United States Patent Application Publication US 2016/0275240 A1 - sequence listing, part 2

SEQ ID NO: 23246 - DNA, 40 bp, Artificial Sequence
  Description of Artificial Sequence: Synthetic primer
caacgacacatagctgggtgtcaggctgagggttagtgag

SEQ ID NO: 23247 - DNA, 40 bp, Artificial Sequence
  Description of Artificial Sequence: Synthetic primer
gaaggccaggggcgccctggctaccgggagctccaggggc

SEQ ID NO: 23248 - DNA, 40 bp, Artificial Sequence
  Description of Artificial Sequence: Synthetic primer
tttcagtgactgataaaatggtcttcctcttcctctggtc

SEQ ID NO: 23249 - DNA, 40 bp, Artificial Sequence
  Description of Artificial Sequence: Synthetic primer
ccatataatgagggctgggctgggctgacttcacctgcac

SEQ ID NO: 23250 - DNA, 40 bp, Artificial Sequence
  Description of Artificial Sequence: Synthetic primer
cccgacaggcacgcacacccaccccacagtgcccggctcg

SEQ ID NO: 23251 - DNA, 40 bp, Artificial Sequence
  Description of Artificial Sequence: Synthetic primer
gcctgaggccacctaggccctcgccaggcttggagtgggg

SEQ ID NO: 23252 - DNA, 40 bp, Artificial Sequence
  Description of Artificial Sequence: Synthetic primer
cttctgcaagccatgtttcctgtaattgacttagatcttg

SEQ ID NO: 23253 - DNA, 40 bp, Artificial Sequence
  Description of Artificial Sequence: Synthetic primer
gaggtatcttctttagtggtggtatgtaatggaacttagc

SEQ ID NO: 23254 - DNA, 40 bp, Artificial Sequence
  Description of Artificial Sequence: Synthetic primer
agatgactgggaactggaatagtatatacagagaaactgg

SEQ ID NO: 23255 - DNA, 40 bp, Artificial Sequence
  Description of Artificial Sequence: Synthetic primer
tggacaagacaaaccaagtcggaacagcagataacaatgc

SEQ ID NO: 23256 - DNA, 40 bp, Artificial Sequence
  Description of Artificial Sequence: Synthetic primer
gcaacaagagcaggagttctatgagcagaaaatcaaagag

SEQ ID NO: 23257 - DNA, 40 bp, Artificial Sequence
  Description of Artificial Sequence: Synthetic primer
ttgtcccaagtcttatttgctgactttttctgtcatgagt

SEQ ID NO: 23258 - DNA, 40 bp, Artificial Sequence
  Description of Artificial Sequence: Synthetic primer
cacaggggtgggcttcggggcagaaaggagccgcccagtg

SEQ ID NO: 23259 - DNA, 40 bp, Artificial Sequence
  Description of Artificial Sequence: Synthetic primer
actggaaaaagaaattctgttttacagaaaaactattggg

SEQ ID NO: 23260 - DNA, 40 bp, Artificial Sequence
  Description of Artificial Sequence: Synthetic primer
gacggcttgagaagactgtcaggaaacgagtatgtgttta

SEQ ID NO: 23261 - DNA, 40 bp, Artificial Sequence
  Description of Artificial Sequence: Synthetic primer
cacgtatccagacgcaggcctgtgaaggaattcccgatgc

SEQ ID NO: 23262 - DNA, 40 bp, Artificial Sequence
  Description of Artificial Sequence: Synthetic primer
ttaccatctccacagatgaggctgggtcaagcatagtgtc

SEQ ID NO: 23263 - DNA, 40 bp, Artificial Sequence
  Description of Artificial Sequence: Synthetic primer
cactttgtccagcccaaataccttcctgggcaactcctac

SEQ ID NO: 23264 - DNA, 40 bp, Artificial Sequence
  Description of Artificial Sequence: Synthetic primer
cttcactcgaaccgttagttcaggggaaaactttaaacag

SEQ ID NO: 23265 - DNA, 40 bp, Artificial Sequence
  Description of Artificial Sequence: Synthetic primer
attacttattgaatcagcctttttggagctgtttgtcctc

SEQ ID NO: 23266 - DNA, 40 bp, Artificial Sequence
  Description of Artificial Sequence: Synthetic primer
aggaattcctcatacatcttccgctttctcagtgtgcttc

SEQ ID NO: 23267 - DNA, 40 bp, Artificial Sequence
  Description of Artificial Sequence: Synthetic primer
ctaccaggtggcccgaggcatggagtatctggcctccaag

SEQ ID NO: 23268 - DNA, 40 bp, Artificial Sequence
  Description of Artificial Sequence: Synthetic primer
agttgatcattcagagccaaacgcatataccaataaagac

SEQ ID NO: 23269 - DNA, 40 bp, Artificial Sequence
  Description of Artificial Sequence: Synthetic primer
cttctgaaaaatcaaagttgactcctaagccagagacttc

SEQ ID NO: 23270 - DNA, 40 bp, Artificial Sequence
  Description of Artificial Sequence: Synthetic primer
cttcaggctgcagggagctgctgcagaagtggtgccctgg

SEQ ID NO: 23271 - DNA, 40 bp, Artificial Sequence
  Description of Artificial Sequence: Synthetic primer
attatgagacaattgaacagaagaaggcgtatgaagttgc

SEQ ID NO: 23272 - DNA, 40 bp, Artificial Sequence
  Description of Artificial Sequence: Synthetic primer
gggctctacagcctggaagcttctgcactaatgtgtcttc

SEQ ID NO: 23273 - DNA, 40 bp, Artificial Sequence
  Description of Artificial Sequence: Synthetic primer
aaatttttttatcattaacacttgaagtaataaaataggc

SEQ ID NO: 23274 - DNA, 40 bp, Artificial Sequence
  Description of Artificial Sequence: Synthetic primer
tcttcgtggaagagagtggaatccaatccttcccattttg

SEQ ID NO: 23275 - DNA, 40 bp, Artificial Sequence
  Description of Artificial Sequence: Synthetic primer
tgtgtttgtgtctcctgtgactatctccttcttcactttc

SEQ ID NO: 23276 - DNA, 40 bp, Artificial Sequence
  Description of Artificial Sequence: Synthetic primer
cgattttcttttcagccttctgtagtaagagctcttctgc

SEQ ID NO: 23277 - DNA, 40 bp, Artificial Sequence
  Description of Artificial Sequence: Synthetic primer
acaaaaatgtagttatttaaagtgaataaaaattaagatg

SEQ ID NO: 23278 - DNA, 40 bp, Artificial Sequence
  Description of Artificial Sequence: Synthetic primer
aactccataatctgcattaaatctaattgcctctgaaaag

SEQ ID NO: 23279 - DNA, 40 bp, Artificial Sequence
  Description of Artificial Sequence: Synthetic primer
ttactgagtctcttgagtccaaagtggtgtcagatattgg

SEQ ID NO: 23280 - DNA, 40 bp, Artificial Sequence
  Description of Artificial Sequence: Synthetic primer
ctgcacttagaagcactggcaaaaccatgcccacatagag

SEQ ID NO: 23281 - DNA, 40 bp, Artificial Sequence
  Description of Artificial Sequence: Synthetic primer
caagttcttccatatgaggtaaagggatccaagattaagg

SEQ ID NO: 23282 - DNA, 40 bp, Artificial Sequence
  Description of Artificial Sequence: Synthetic primer
gctgtcctcggcgaggctggttcgaggtgacattattggc

SEQ ID NO: 23283 - DNA, 40 bp, Artificial Sequence
  Description of Artificial Sequence: Synthetic primer
cctgaccgcttgttgttgtactctctctcatactgctgtg

SEQ ID NO: 23284 - DNA, 40 bp, Artificial Sequence
  Description of Artificial Sequence: Synthetic primer
tatttacttctctcttttaacataaggttgggaacacttc

SEQ ID NO: 23285 - DNA, 40 bp, Artificial Sequence
  Description of Artificial Sequence: Synthetic primer
catgaaggcagcatttattaccccatttgtaagttcattg

SEQ ID NO: 23286 - DNA, 40 bp, Artificial Sequence
  Description of Artificial Sequence: Synthetic primer
ccttacagatataagagaggcatcatttaaaaggtagaac

SEQ ID NO: 23287 - DNA, 40 bp, Artificial Sequence
  Description of Artificial Sequence: Synthetic primer
gaggggactggagtcaagggcttctcatcctttcgcttag

SEQ ID NO: 23288 - DNA, 40 bp, Artificial Sequence
  Description of Artificial Sequence: Synthetic primer
gcagccacgccctgcgcccaacacttccgggagcgacatc

SEQ ID NO: 23289 - DNA, 40 bp, Artificial Sequence
  Description of Artificial Sequence: Synthetic primer
cctttatgtgctacacataatttgtataaaattttatatg

SEQ ID NO: 23290 - DNA, 40 bp, Artificial Sequence
  Description of Artificial Sequence: Synthetic primer
ttgacaattgcccagaagggttggaagccaacaaccatac

SEQ ID NO: 23291 - DNA, 40 bp, Artificial Sequence
  Description of Artificial Sequence: Synthetic primer
cgccgctcccgccgccgaaaatggcgtctcagtgttgctc

SEQ ID NO: 23292 - DNA, 40 bp, Artificial Sequence
  Description of Artificial Sequence: Synthetic primer
aaaacaaatcactggagcttctcatgtcagcagaatctgg

SEQ ID NO: 23293 - DNA, 40 bp, Artificial Sequence
  Description of Artificial Sequence: Synthetic primer
caagttactaaattcttccccaaaagagaaagcacaaatg

SEQ ID NO: 23294 - DNA, 40 bp, Artificial Sequence
  Description of Artificial Sequence: Synthetic primer
gttttcaagctgttgttttaagaagcaaaagatagttctg

SEQ ID NO: 23295 - DNA, 40 bp, Artificial Sequence
  Description of Artificial Sequence: Synthetic primer
tgagaactaactggccatagccaatgacaggctcccacag

SEQ ID NO: 23296 - DNA, 40 bp, Artificial Sequence
  Description of Artificial Sequence: Synthetic primer
gccttagccagccctggcaatgcattgaggagttcactcc

SEQ ID NO: 23297 - DNA, 40 bp, Artificial Sequence
  Description of Artificial Sequence: Synthetic primer
taagaggtttatgagcagagtccatttaaccttcgataag

SEQ ID NO: 23298 - DNA, 40 bp, Artificial Sequence
  Description of Artificial Sequence: Synthetic primer
agtcatctacaataataaatccaaagaggagccagttacc

SEQ ID NO: 23299 - DNA, 40 bp, Artificial Sequence
  Description of Artificial Sequence: Synthetic primer
gcaccagtggtggtctgaggttggagattcgagaaatgtg

SEQ ID NO: 23300 - DNA, 40 bp, Artificial Sequence
  Description of Artificial Sequence: Synthetic primer
agctgagttggaggacaacaatttctttgtcttttgtttg

SEQ ID NO: 23301 - DNA, 40 bp, Artificial Sequence
  Description of Artificial Sequence: Synthetic primer
gggcagtattgctgcagccttggcttttcttcctgacaac

SEQ ID NO: 23302 - DNA, 40 bp, Artificial Sequence
  Description of Artificial Sequence: Synthetic primer
cagctactactgctactggaactgccttaaccactactgc

SEQ ID NO: 23303 - DNA, 40 bp, Artificial Sequence
  Description of Artificial Sequence: Synthetic primer
ttccttaaacttccggttccttcgatcatttttgctattg

SEQ ID NO: 23304 - DNA, 40 bp, Artificial Sequence
  Description of Artificial Sequence: Synthetic primer
ggaaagacgcttcagccccatctcagaggccccacaaaag

SEQ ID NO: 23305 - DNA, 40 bp, Artificial Sequence
  Description of Artificial Sequence: Synthetic primer
aaggacagattggattatgaagataagttcagagacacag

SEQ ID NO: 23306 - DNA, 40 bp, Artificial Sequence
  Description of Artificial Sequence: Synthetic primer
gcagcctgccttggagctgaaagaggagagcttcagagac

SEQ ID NO: 23307 - DNA, 40 bp, Artificial Sequence
  Description of Artificial Sequence: Synthetic primer
tgatataaaaaggatatccataatgaatattttatactgc

SEQ ID NO: 23308 - DNA, 40 bp, Artificial Sequence
  Description of Artificial Sequence: Synthetic primer
ggctcccgcagccccgcgtgggctcgtgcgagtcggcctc

SEQ ID NO: 23309 - DNA, 40 bp, Artificial Sequence
  Description of Artificial Sequence: Synthetic primer
gtaggtgtagtaagagccttctgggctgctggatttgttg

SEQ ID NO: 23310 - DNA, 40 bp, Artificial Sequence
  Description of Artificial Sequence: Synthetic primer
aggcttgtggctacaaacagatgtacataattaaaatgag

SEQ ID NO: 23311 - DNA, 40 bp, Artificial Sequence
  Description of Artificial Sequence: Synthetic primer
cccaaattataaaacagtcaggctacactcaaaacaaaac

SEQ ID NO: 23312 - DNA, 40 bp, Artificial Sequence
  Description of Artificial Sequence: Synthetic primer
cttcctcttctaagatataaacattttaaatgatttattc

SEQ ID NO: 23313 - DNA, 40 bp, Artificial Sequence
  Description of Artificial Sequence: Synthetic primer
ctgccatttaatgtgtcattgtacatgtctttccgtactc

SEQ ID NO: 23314 - DNA, 40 bp, Artificial Sequence
  Description of Artificial Sequence: Synthetic primer
aacctttacagtattgtttcttttctctttgttaactgtg

SEQ ID NO: 23315 - DNA, 40 bp, Artificial Sequence
  Description of Artificial Sequence: Synthetic primer
tcgaattttgaattgagtaaagtgcaatttcattggatag

SEQ ID NO: 23316 - DNA, 40 bp, Artificial Sequence
  Description of Artificial Sequence: Synthetic primer
tatatatttttggaaatgtagcattttatactttcaagtg

SEQ ID NO: 23317 - DNA, 40 bp, Artificial Sequence
  Description of Artificial Sequence: Synthetic primer
aaatcttccttcatgcttttttgtttgtgtgtgtccatac

SEQ ID NO: 23318 - DNA, 40 bp, Artificial Sequence
  Description of Artificial Sequence: Synthetic primer
ttccatgacaacaggaaggttaaggtgggtcatgcgattc

SEQ ID NO: 23319 - DNA, 40 bp, Artificial Sequence
  Description of Artificial Sequence: Synthetic primer
atagaaaattattaaaatcttagtttgaggggttttatag

SEQ ID NO: 23320 - DNA, 40 bp, Artificial Sequence
  Description of Artificial Sequence: Synthetic primer
caggctgagaagaggggaatctccgaccccgacaccctac

SEQ ID NO: 23321 - DNA, 40 bp, Artificial Sequence
  Description of Artificial Sequence: Synthetic primer
cagctgaattctcatggtgaaaacaggggaaaggacaaag

SEQ ID NO: 23322 - DNA, 40 bp, Artificial Sequence
  Description of Artificial Sequence: Synthetic primer
ggtggagcctcagttcctctagtatctccctcttctttcc

SEQ ID NO: 23323 - DNA, 40 bp, Artificial Sequence
  Description of Artificial Sequence: Synthetic primer
tgtctgtggcaaacacagttccatttgtgtagacagagac

SEQ ID NO: 23324 - DNA, 40 bp, Artificial Sequence
  Description of Artificial Sequence: Synthetic primer
ccgtgaggacggcgagaaggcggcgcgcgaggtcaagctg

SEQ ID NO: 23325 - DNA, 40 bp, Artificial Sequence
  Description of Artificial Sequence: Synthetic primer
tcagggcactgaagctctctagcttttctgccatgttttc

SEQ ID NO: 23326 - DNA, 40 bp, Artificial Sequence
  Description of Artificial Sequence: Synthetic primer
gaaaatcttggatcatttttatgtagcatgattttccttg

SEQ ID NO: 23327 - DNA, 40 bp, Artificial Sequence
  Description of Artificial Sequence: Synthetic primer
gaggctcccagggcctgaggtcacctcttcagctgtgatg

SEQ ID NO: 23328 - DNA, 40 bp, Artificial Sequence
  Description of Artificial Sequence: Synthetic primer
aacttttactgaaacagctacagcatcaaaagagttaagg

SEQ ID NO: 23329 - DNA, 40 bp, Artificial Sequence
  Description of Artificial Sequence: Synthetic primer
ggtatattttcctttaagaaagaagaaatattgccaagag

SEQ ID NO: 23330 - DNA, 40 bp, Artificial Sequence
  Description of Artificial Sequence: Synthetic primer
gtttggtttggcttatacggtgttttgctttttaaactac

SEQ ID NO: 23331 - DNA, 40 bp, Artificial Sequence
  Description of Artificial Sequence: Synthetic primer
tccacaaggtctatctgtctgcattcttggcggcatactg

SEQ ID NO: 23332 - DNA, 40 bp, Artificial Sequence
  Description of Artificial Sequence: Synthetic primer
tgacaaaattttggatcaactgaaaaaagcatgacttttg

SEQ ID NO: 23333 - DNA, 40 bp, Artificial Sequence
  Description of Artificial Sequence: Synthetic primer
tggggaacaccaatgcagaggtaactctcaggcagctaag

SEQ ID NO: 23334 - DNA, 40 bp, Artificial Sequence
  Description of Artificial Sequence: Synthetic primer
tgataaaattttgtaacaatactgttttttcagttttttg

SEQ ID NO: 23335 - DNA, 40 bp, Artificial Sequence
  Description of Artificial Sequence: Synthetic primer
aatcacagctgggccccgagtgggcagaggaggtgccttg

SEQ ID NO: 23336 - DNA, 40 bp, Artificial Sequence
  Description of Artificial Sequence: Synthetic primer
tgtcaagtacagctgagctttacccagtaagccatgcttc

SEQ ID NO: 23337 - DNA, 40 bp, Artificial Sequence
  Description of Artificial Sequence: Synthetic primer
ctcgtaccctctgagctcgagtcattgcatactgtccatc

SEQ ID NO: 23338 - DNA, 40 bp, Artificial Sequence
  Description of Artificial Sequence: Synthetic primer
ggacatctatagtgtttgctccgacgggagaagataaaac

SEQ ID NO: 23339 - DNA, 40 bp, Artificial Sequence
  Description of Artificial Sequence: Synthetic primer
agccacagagacagaaagtgggaacatcaagcagataccg

SEQ ID NO: 23340 - DNA, 40 bp, Artificial Sequence
  Description of Artificial Sequence: Synthetic primer
cttttggcagactgaaaaactgggtaaatcttctaatagg

SEQ ID NO: 23341 - DNA, 40 bp, Artificial Sequence
  Description of Artificial Sequence: Synthetic primer
gacatgacgccgctcagcgagcaagagatgaatgcccatc

SEQ ID NO: 23342 - DNA, 40 bp, Artificial Sequence
  Description of Artificial Sequence: Synthetic primer
cagaatgtcaaattcttacattttcttttaaatagtgttg

SEQ ID NO: 23343 - DNA, 40 bp, Artificial Sequence
  Description of Artificial Sequence: Synthetic primer
actccgcccagctgagaagcgcggggccctgacgcgggcg

SEQ ID NO: 23344 - DNA, 40 bp, Artificial Sequence
  Description of Artificial Sequence: Synthetic primer
gattactatgcaagctattactccagccagtacgattatg

SEQ ID NO: 23345 - DNA, 40 bp, Artificial Sequence
  Description of Artificial Sequence: Synthetic primer
tcctgatgtagctctgaacttcttcccaccttctctcagc

SEQ ID NO: 23346 - DNA, 40 bp, Artificial Sequence
  Description of Artificial Sequence: Synthetic primer
tgaaaattgttcccagaaggtaattttcatagatgtttgc

SEQ ID NO: 23347 - DNA, 40 bp, Artificial Sequence
  Description of Artificial Sequence: Synthetic primer
tatgattgatgttcttagtctgggctactggtatatcttc

SEQ ID NO: 23348 - DNA, 40 bp, Artificial Sequence
  Description of Artificial Sequence: Synthetic primer
tcgcaagctccatcagctgcatcttcttcaggctgtcttc

SEQ ID NO: 23349 - DNA, 40 bp, Artificial Sequence
  Description of Artificial Sequence: Synthetic primer
actgaggagggccacggccgggccgggccgggcgtgctgc

SEQ ID NO: 23350 - DNA, 40 bp, Artificial Sequence
  Description of Artificial Sequence: Synthetic primer
acgcacacgagaacgacatcacccacttctacatgctcac

SEQ ID NO: 23351 - DNA, 40 bp, Artificial Sequence
  Description of Artificial Sequence: Synthetic primer
ggggcagggcatgctgatgctgagcgtacaggcagacaag

SEQ ID NO: 23352 - DNA, 40 bp, Artificial Sequence
  Description of Artificial Sequence: Synthetic primer
ctaaaaaaagttatatactgtttgaagaaaaaatgtttag

SEQ ID NO: 23353 - DNA, 40 bp, Artificial Sequence
  Description of Artificial Sequence: Synthetic primer
ggctttatatatgcaaaatataaaagtatccctaagtaac

SEQ ID NO: 23354 - DNA, 40 bp, Artificial Sequence
  Description of Artificial Sequence: Synthetic primer
tccggacgtggccgcccagctcccggcacacccgggttcc

SEQ ID NO: 23355 - DNA, 40 bp, Artificial Sequence
  Description of Artificial Sequence: Synthetic primer
gggaagctgagcggcggcggcgacggcggcgcgagcttcc

SEQ ID NO: 23356 - DNA, 40 bp, Artificial Sequence
  Description of Artificial Sequence: Synthetic primer
acaattcgtaataaaggatccaggagtttttgtagatagg

SEQ ID NO: 23357 - DNA, 40 bp, Artificial Sequence
  Description of Artificial Sequence: Synthetic primer
atgactatgatcaccaaggtcactggaccagacaaatatc

SEQ ID NO: 23358 - DNA, 40 bp, Artificial Sequence
  Description of Artificial Sequence: Synthetic primer
tgatggagaggcagaaacggaaggcggacatcgagaaagg

SEQ ID NO: 23359 - DNA, 40 bp, Artificial Sequence
  Description of Artificial Sequence: Synthetic primer
caagacccagtttgtgttattatatgggataaccaggtag

SEQ ID NO: 23360 - DNA, 40 bp, Artificial Sequence
  Description of Artificial Sequence: Synthetic primer
ggagtggctggaacaagctccatgtagcaaacagtctatg

SEQ ID NO: 23361 - DNA, 40 bp, Artificial Sequence
  Description of Artificial Sequence: Synthetic primer
gtgcggtctcaaagcaaatgcttttaagagctaaaaattc

SEQ ID NO: 23362 - DNA, 40 bp, Artificial Sequence
  Description of Artificial Sequence: Synthetic primer
tgtctgaatcctcctgtcgtgattgggtacactggttgac

SEQ ID NO: 23363 - DNA, 40 bp, Artificial Sequence
  Description of Artificial Sequence: Synthetic primer
aggcagctcagcgacatgcgctccctctggaaggccaatc

SEQ ID NO: 23364 - DNA, 40 bp, Artificial Sequence
  Description of Artificial Sequence: Synthetic primer
ctggtttttagatttttttgttttcaaaaaaacatttgtc

SEQ ID NO: 23365 - DNA, 40 bp, Artificial Sequence
  Description of Artificial Sequence: Synthetic primer
agggccagcaacctgtcccagcacaaaagaaaatagactc

SEQ ID NO: 23366 - DNA, 40 bp, Artificial Sequence
  Description of Artificial Sequence: Synthetic primer
gatctttgatatattaaatggccttatctgtccacttctc

SEQ ID NO: 23367 - DNA, 40 bp, Artificial Sequence
  Description of Artificial Sequence: Synthetic primer
ggctgccccagcccgctgtttccggcttctccttctaccc

SEQ ID NO: 23368 - DNA, 40 bp, Artificial Sequence
  Description of Artificial Sequence: Synthetic primer
ttcagtaaatgtaaacacatcacttggtcaattttcacag

SEQ ID NO: 23369 - DNA, 40 bp, Artificial Sequence
  Description of Artificial Sequence: Synthetic primer
atataaacaagcattagattatatggcaaaggcaaatcag

SEQ ID NO: 23370 - DNA, 40 bp, Artificial Sequence
  Description of Artificial Sequence: Synthetic primer
catgtagacatgttgcacattttttccaaatttatacatg

SEQ ID NO: 23371 - DNA, 40 bp, Artificial Sequence
  Description of Artificial Sequence: Synthetic primer
ccaggcaaactttcactttccccgggccgagcctcactgg

SEQ ID NO: 23372 - DNA, 40 bp, Artificial Sequence
  Description of Artificial Sequence: Synthetic primer
atgcacagcatgactagaagagagatggtgtatttctcac

SEQ ID NO: 23373 - DNA, 40 bp, Artificial Sequence
  Description of Artificial Sequence: Synthetic primer
ggagtttcctgagggttttctcataaatgagggctgcaca

SEQ ID NO: 23374 - DNA, 40 bp, Artificial Sequence
  Description of Artificial Sequence: Synthetic primer
acggggcatttgttttcttggcagtgcttggcgtggtagc

SEQ ID NO: 23375 - DNA, 40 bp, Artificial Sequence
  Description of Artificial Sequence: Synthetic primer
ggaaatgtggcgatgggaccacgacagcactatccctatg

SEQ ID NO: 23376 - DNA, 40 bp, Artificial Sequence
  Description of Artificial Sequence: Synthetic primer
aaagaatgaagcactttttgttaaatacaggagaggctac

SEQ ID NO: 23377 - DNA, 40 bp, Artificial Sequence
  Description of Artificial Sequence: Synthetic primer
tgagggcagcggtgggtcccaagatcgagcggtgaaactg

SEQ ID NO: 23378 - DNA, 40 bp, Artificial Sequence
  Description of Artificial Sequence: Synthetic primer
atggctcttcgtgttatagcagttgatgcagaggtcgtag

SEQ ID NO: 23379 - DNA, 40 bp, Artificial Sequence
  Description of Artificial Sequence: Synthetic primer
tttttgctgcctgcagccaaagatttgcctaatttgaatg

SEQ ID NO: 23380 - DNA, 40 bp, Artificial Sequence
  Description of Artificial Sequence: Synthetic primer
agctccaactaccacaagtttatattcagtcattttcagc

SEQ ID NO: 23381 - DNA, 40 bp, Artificial Sequence
  Description of Artificial Sequence: Synthetic primer
gtgcccagcatcacaggcgcagggaagagaagagggacac

SEQ ID NO: 23382 - DNA, 40 bp, Artificial Sequence
  Description of Artificial Sequence: Synthetic primer
gtggtaatacaaagcagggagaacagaaaggtagagttac

SEQ ID NO: 23383 - DNA, 40 bp, Artificial Sequence
  Description of Artificial Sequence: Synthetic primer
aatctgtattgtcggatctccctcaccaatgtataaaaag

SEQ ID NO: 23384 - DNA, 40 bp, Artificial Sequence
  Description of Artificial Sequence: Synthetic primer
cttcccgctcgcgcctggggttccctctcctccccctgtg

SEQ ID NO: 23385 - DNA, 40 bp, Artificial Sequence
  Description of Artificial Sequence: Synthetic primer
cacatgccggctcagagaatactatgaccagacagctcag

SEQ ID NO: 23386 - DNA, 40 bp, Artificial Sequence
  Description of Artificial Sequence: Synthetic primer
cctaataatagaagttgtaccaaaatgcctgtggtacttg

SEQ ID NO: 23387 - DNA, 40 bp, Artificial Sequence
  Description of Artificial Sequence: Synthetic primer
ctactttgttacatagtcagcttgtaaattttgtggaacc

SEQ ID NO: 23388 - DNA, 40 bp, Artificial Sequence
  Description of Artificial Sequence: Synthetic primer
gcattattaaatatggatcagacttgaaaagtgtttatgc

SEQ ID NO: 23389 - DNA, 40 bp, Artificial Sequence
  Description of Artificial Sequence: Synthetic primer
aagtgtgtatttttacttccaaagtgtgataggtatattg

SEQ ID NO: 23390 - DNA, 40 bp, Artificial Sequence
  Description of Artificial Sequence: Synthetic primer
ctcttcttctttctggttgtttttgttctttgtgttttag

SEQ ID NO: 23391 - DNA, 40 bp, Artificial Sequence
  Description of Artificial Sequence: Synthetic primer
gccctgcgccactactacaaactaaacattatcaggaagg

SEQ ID NO: 23392 - DNA, 40 bp, Artificial Sequence
  Description of Artificial Sequence: Synthetic primer
ttatcatatacaatttaagtttacaatacacagcattttc

SEQ ID NO: 23393 - DNA, 40 bp, Artificial Sequence
  Description of Artificial Sequence: Synthetic primer
gggccggaacctcaagaaggaggtcagccgggtgctgtgc

SEQ ID NO: 23394 - DNA, 40 bp, Artificial Sequence
  Description of Artificial Sequence: Synthetic primer
catttccccattagatagcaatatggtggtgtctgcaatg

SEQ ID NO: 23395 - DNA, 40 bp, Artificial Sequence
  Description of Artificial Sequence: Synthetic primer
tgcaaacatcttggcgggaagtaaactcgacatgtataac

SEQ ID NO: 23396 - DNA, 40 bp, Artificial Sequence
  Description of Artificial Sequence: Synthetic primer
cgtacacgactcccagaatctgaggcagagagtgctccag

SEQ ID NO: 23397 - DNA, 40 bp, Artificial Sequence
  Description of Artificial Sequence: Synthetic primer
tccaggcatctaggttctttttattcctagatggaactgc

SEQ ID NO: 23398 - DNA, 40 bp, Artificial Sequence
  Description of Artificial Sequence: Synthetic primer
cgccccacccctccagaacacggctcacgcttacctcaac

SEQ ID NO: 23399 - DNA, 40 bp, Artificial Sequence
  Description of Artificial Sequence: Synthetic primer
tgctgtaatctggagatgctttttactttcaaccataagc

SEQ ID NO: 23400 - DNA, 40 bp, Artificial Sequence
  Description of Artificial Sequence: Synthetic primer
agtcacgctgtctcctggcagactggtcagcacgcctctc

SEQ ID NO: 23401 - DNA, 40 bp, Artificial Sequence
  Description of Artificial Sequence: Synthetic primer
gtctgctatgcctgtccagtgcccaccagtgacagaaaac

SEQ ID NO: 23402 - DNA, 40 bp, Artificial Sequence
  Description of Artificial Sequence: Synthetic primer
agttcacagacaaggaaacttctatgtaaaaatcactatg

SEQ ID NO: 23403 - DNA, 40 bp, Artificial Sequence
  Description of Artificial Sequence: Synthetic primer
ggcagatacacactggtccagccttaaccttaccagttca

SEQ ID NO: 23404 - DNA, 40 bp, Artificial Sequence
  Description of Artificial Sequence: Synthetic primer
gctcatatcccatataatctagaactaaatatggtgtgtg

SEQ ID NO: 23405 - DNA, 40 bp, Artificial Sequence
  Description of Artificial Sequence: Synthetic primer
gaaatgataaagcatgatgtcatacagaaggttaaaatag

SEQ ID NO: 23406 - DNA, 40 bp, Artificial Sequence
  Description of Artificial Sequence: Synthetic primer
ggcacccagtctcctttcttcctgctgctgctcctcacag

SEQ ID NO: 23407 - DNA, 40 bp, Artificial Sequence
  Description of Artificial Sequence: Synthetic primer
ctagcgcctcatgttttacattttggcactaactgtcatc

SEQ ID NO: 23408 - DNA, 40 bp, Artificial Sequence
  Description of Artificial Sequence: Synthetic primer
tatggtttcaaacatctttgccaaaagctaagcagtggtg

SEQ ID NO: 23409 - DNA, 40 bp, Artificial Sequence
  Description of Artificial Sequence: Synthetic primer
atcttttatcttcagtttcctgggtgggaatgagccacac

SEQ ID NO: 23410 - DNA, 40 bp, Artificial Sequence
  Description of Artificial Sequence: Synthetic primer
agtcctaacaaatgctcccacctgaatttgtatatgactg

SEQ ID NO: 23411 - DNA, 40 bp, Artificial Sequence
  Description of Artificial Sequence: Synthetic primer
ggtgaccccatgagctgtcgctgcatctttctcatgaagc

SEQ ID NO: 23412 - DNA, 40 bp, Artificial Sequence
  Description of Artificial Sequence: Synthetic primer
atttctttagcctgtagcaacctaaactgtaattcctatc

SEQ ID NO: 23413 - DNA, 40 bp, Artificial Sequence
  Description of Artificial Sequence: Synthetic primer
cggaggaaatgacaattacctgacgatcacagggccttcg

SEQ ID NO: 23414 - DNA, 40 bp, Artificial Sequence
  Description of Artificial Sequence: Synthetic primer
cccacctcagtcgcccacctcagtctccgggaagaaaagc

SEQ ID NO: 23415 - DNA, 40 bp, Artificial Sequence
  Description of Artificial Sequence: Synthetic primer
tctttggacagcagctccaggacagggcgggtgggctgac

SEQ ID NO: 23416 - DNA, 40 bp, Artificial Sequence
  Description of Artificial Sequence: Synthetic primer
aatctggttatatgcccaaacctctaatcaagaaataatg

SEQ ID NO: 23417 - DNA, 40 bp, Artificial Sequence
  Description of Artificial Sequence: Synthetic primer
ttgcctgcttcacctggaggaccagcaggaccagggagac

SEQ ID NO: 23418 - DNA, 40 bp, Artificial Sequence
  Description of Artificial Sequence: Synthetic primer
tttctacaataagatcaagagtgggtaccggatggccaag

SEQ ID NO: 23419 - DNA, 40 bp, Artificial Sequence
  Description of Artificial Sequence: Synthetic primer
ctcgaagtgtgggaggtactggcaatggtttgtctttatg

SEQ ID NO: 23420 - DNA, 40 bp, Artificial Sequence
  Description of Artificial Sequence: Synthetic primer
cttagcagagcccgccctgtctctgcggcagcctatcgac

SEQ ID NO: 23421 - DNA, 40 bp, Artificial Sequence
  Description of Artificial Sequence: Synthetic primer
catttcagttttgtatttgaactactgtaagaagagaagc

SEQ ID NO: 23422 - DNA, 40 bp, Artificial Sequence
  Description of Artificial Sequence: Synthetic primer
gagatgtgatggagtgggctggcagagtcatcatcattgc

SEQ ID NO: 23423 - DNA, 40 bp, Artificial Sequence
  Description of Artificial Sequence: Synthetic primer
gcctcagtatggaggccttccagcaccgttctgtgtcctg

SEQ ID NO: 23424 - DNA, 40 bp, Artificial Sequence
  Description of Artificial Sequence: Synthetic primer
tgcaaagtcagacatttacaaataaaaaggttcagagcag

SEQ ID NO: 23425 - DNA, 40 bp, Artificial Sequence
  Description of Artificial Sequence: Synthetic primer
tgctgccaagagggtcaagttggacagtgtcagagtcctg

SEQ ID NO: 23426 - DNA, 40 bp, Artificial Sequence
  Description of Artificial Sequence: Synthetic primer
ggagctgtggtgtacattgacacagagtctgcatttagtg

SEQ ID NO: 23427 - DNA, 40 bp, Artificial Sequence
  Description of Artificial Sequence: Synthetic primer
tctggggtctcaacgcacacccgaggtcttccggggattc

SEQ ID NO: 23428 - DNA, 40 bp, Artificial Sequence
  Description of Artificial Sequence: Synthetic primer
tgatatcttcatacatgttcacagaaatatctgccttctc

SEQ ID NO: 23429 - DNA, 40 bp, Artificial Sequence
  Description of Artificial Sequence: Synthetic primer
agtggctgccactgctgggtttgtgtaagagaggctgctg

SEQ ID NO: 23430 - DNA, 40 bp, Artificial Sequence
  Description of Artificial Sequence: Synthetic primer
ggtctgaacgagaaaaccttcgttcacagtccttgaagtc

SEQ ID NO: 23431 - DNA, 40 bp, Artificial Sequence
  Description of Artificial Sequence: Synthetic primer
gcacctttagcaccaggctgtccatcagcaccagggtttc

SEQ ID NO: 23432 - DNA, 40 bp, Artificial Sequence
  Description of Artificial Sequence: Synthetic primer
ttacatctgcactttcttgtttgatgtttatttttatttc

SEQ ID NO: 23433 - DNA, 40 bp, Artificial Sequence
  Description of Artificial Sequence: Synthetic primer
gcagcacaacttcgaattatgagcaggaccagaaatactc

SEQ ID NO: 23434 - DNA, 40 bp, Artificial Sequence
  Description of Artificial Sequence: Synthetic primer
caaaaaaagtcagaaaggtgcctcctggtttgccttcttc

SEQ ID NO: 23435 - DNA, 40 bp, Artificial Sequence
  Description of Artificial Sequence: Synthetic primer
attggagaggcccagaaaacccccttgtttataaatctgc

SEQ ID NO: 23436 - DNA, 40 bp, Artificial Sequence
  Description of Artificial Sequence: Synthetic primer
gcctggtgaacgtggtgcagctggtcttccagggcctaag

SEQ ID NO: 23437 - DNA, 40 bp, Artificial Sequence
  Description of Artificial Sequence: Synthetic primer
gagccggccagtcacaggggagcgagggcagctgctggag

SEQ ID NO: 23438 - DNA, 40 bp, Artificial Sequence
  Description of Artificial Sequence: Synthetic primer
gtggccatcagctccaaatttgagacccgggaggatattg

SEQ ID NO: 23439 - DNA, 40 bp, Artificial Sequence
  Description of Artificial Sequence: Synthetic primer
gatttagctttttcaaaatttctatttctgtttcaacatt

SEQ ID NO: 23440 - DNA, 40 bp, Artificial Sequence
  Description of Artificial Sequence: Synthetic primer
tgacattgccaccactctgcagcacctccacatgatcgac

SEQ ID NO: 23441 - DNA, 40 bp, Artificial Sequence
  Description of Artificial Sequence: Synthetic primer
tggggtccagaggggcctcgggcaccagggaagccaggag

SEQ ID NO: 23442 - DNA, 40 bp, Artificial Sequence
  Description of Artificial Sequence: Synthetic primer
aggattttcaatgcattcaggtggtacccatggtattctc

SEQ ID NO: 23443 - DNA, 40 bp, Artificial Sequence
  Description of Artificial Sequence: Synthetic primer
cccctgtccctgccagtgaatcgcatgcaagtttctcaag

SEQ ID NO: 23444 - DNA, 40 bp, Artificial Sequence
  Description of Artificial Sequence: Synthetic primer
tgcagttcttccaatgagagatgatttgtcgtgaagatgc

SEQ ID NO: 23445 - DNA, 40 bp, Artificial Sequence
  Description of Artificial Sequence: Synthetic primer
tgagccacctcaaacctagtttcagcaatttctttttctc

SEQ ID NO: 23446 - DNA, 40 bp, Artificial Sequence
  Description of Artificial Sequence: Synthetic primer
actctgcattttcatctcctgggctgtctgatgtggatag

SEQ ID NO: 23447 - DNA, 40 bp, Artificial Sequence
  Description of Artificial Sequence: Synthetic primer
cacctcaggccgatgcttgaatcggttatatcaacaaagc

SEQ ID NO: 23448 - DNA, 40 bp, Artificial Sequence
  Description of Artificial Sequence: Synthetic primer
atgtgaaggagtggcaaatgtccaggggctgctggaagac

SEQ ID NO: 23449 - DNA, 40 bp, Artificial Sequence
  Description of Artificial Sequence: Synthetic primer
gtctcggcaccctcggcttccccttcacggggccgctttc

SEQ ID NO: 23450 - DNA, 40 bp, Artificial Sequence
  Description of Artificial Sequence: Synthetic primer
gtccaaacacttttctgttagcctttctattccagactcc

SEQ ID NO: 23451 - DNA, 40 bp, Artificial Sequence
  Description of Artificial Sequence: Synthetic primer
acaaatttgaagtgaatacacagagcgtggcctacttagc

SEQ ID NO: 23452 - DNA, 40 bp, Artificial Sequence
  Description of Artificial Sequence: Synthetic primer
gaatcacaagtttaattccttttgagataatttcttcttc

SEQ ID NO: 23453 - DNA, 40 bp, Artificial Sequence
  Description of Artificial Sequence: Synthetic primer
cctcgctaatggccttgtacttcagtttctgggcatagag

SEQ ID NO: 23454 - DNA, 40 bp, Artificial Sequence
  Description of Artificial Sequence: Synthetic primer
ttccaacatctggttgactggcatctatgcagaacttcac

SEQ ID NO: 23455 - DNA, 40 bp, Artificial Sequence
  Description of Artificial Sequence: Synthetic primer
tgctcaagaacatgatatcactaatttctatatgctcacc

SEQ ID NO: 23456 - DNA, 40 bp, Artificial Sequence
  Description of Artificial Sequence: Synthetic primer
acggaaattcctccggttgatttctcatcatagccataag

SEQ ID NO: 23457 - DNA, 40 bp, Artificial Sequence
  Description of Artificial Sequence: Synthetic primer
acgaacttcagacaatttaagcatttccttttccttcttc

SEQ ID NO: 23458 - DNA, 40 bp, Artificial Sequence
  Description of Artificial Sequence: Synthetic primer
ggggtggtgatcaaacaggaacagacggacttcgcctacg

SEQ ID NO: 23459 - DNA, 40 bp, Artificial Sequence
  Description of Artificial Sequence: Synthetic primer
tggtgatcattgaaggagacttggaacgcacagaggaacg

SEQ ID NO: 23460 - DNA, 40 bp, Artificial Sequence
  Description of Artificial Sequence: Synthetic primer
agcaaagccagcagggccggggggaccaggctcaccacgg

SEQ ID NO: 23461 - DNA, 40 bp, Artificial Sequence
  Description of Artificial Sequence: Synthetic primer
aaaggctctgggctgaatgctccgaagtcctgagttcttg

SEQ ID NO: 23462 - DNA, 40 bp, Artificial Sequence
  Description of Artificial Sequence: Synthetic primer
accggggcagggattgcaggctcaccccaatgcagcgaac

SEQ ID NO: 23463 - DNA, 40 bp, Artificial Sequence
  Description of Artificial Sequence: Synthetic primer
tgattgtgatcatctcacttattgtcctggttgtcatttg

SEQ ID NO: 23464 - DNA, 40 bp, Artificial Sequence
  Description of Artificial Sequence: Synthetic primer
accgccctcctgacgcacggccaagaggaaggccaagtcg

SEQ ID NO: 23465 - DNA, 40 bp, Artificial Sequence
  Description of Artificial Sequence: Synthetic primer
aaaatatgatagtcttggatctttgctcgaatacattttg

SEQ ID NO: 23466 - DNA, 40 bp, Artificial Sequence
  Description of Artificial Sequence: Synthetic primer
ggacatcagcaaagacctggagaagatgatggttaagagg

SEQ ID NO: 23467 - DNA, 40 bp, Artificial Sequence
  Description of Artificial Sequence: Synthetic primer
caggccctgcaggacagagactggcagcgcaccgtcatcg

SEQ ID NO: 23468 - DNA, 40 bp, Artificial Sequence
  Description of Artificial Sequence: Synthetic primer
atttgatagaacttttgaagaataatggaagattaccaag

SEQ ID NO: 23469 - DNA, 40 bp, Artificial Sequence
  Description of Artificial Sequence: Synthetic primer
gatgtaatcatctccttcacttggaggacaggcccagatg

SEQ ID NO: 23470 - DNA, 40 bp, Artificial Sequence
  Description of Artificial Sequence: Synthetic primer
tcttcctcttccacaagtggaccatattctatcggcaaag

SEQ ID NO: 23471 - DNA, 40 bp, Artificial Sequence
  Description of Artificial Sequence: Synthetic primer
cagacgccggtactcgtcccgcaggcgctgctcgtctgtc

SEQ ID NO: 23472 - DNA, 40 bp, Artificial Sequence
  Description of Artificial Sequence: Synthetic primer
atcatgtcttagggccactgaattcaagtactagtttagg

SEQ ID NO: 23473 - DNA, 40 bp, Artificial Sequence
  Description of Artificial Sequence: Synthetic primer
tggagatctccgccaacagcttctccttctcggcctgtgg

SEQ ID NO: 23474 - DNA, 40 bp, Artificial Sequence
  Description of Artificial Sequence: Synthetic primer
tttgcagatttataaacaagggggttttctgggcctctcc

SEQ ID NO: 23475 - DNA, 40 bp, Artificial Sequence
  Description of Artificial Sequence: Synthetic primer
gcacggtgcaccattgatggctgttggtgagtggctgctg

SEQ ID NO: 23476 - DNA, 40 bp, Artificial Sequence
  Description of Artificial Sequence: Synthetic primer
tcaacagcactgttgaacatgatgaaaacaggaccattgc

SEQ ID NO: 23477 - DNA, 40 bp, Artificial Sequence
  Description of Artificial Sequence: Synthetic primer
agcactgaatttgttttcttttcgaggtctgccagttttc

SEQ ID NO: 23478 - DNA, 40 bp, Artificial Sequence
  Description of Artificial Sequence: Synthetic primer
gctacaatagtataatggccactgtcttcttccttagcac

SEQ ID NO: 23479 - DNA, 40 bp, Artificial Sequence
  Description of Artificial Sequence: Synthetic primer
ggcccccgtggcctgcctggtgagagaggtcgccctggag

SEQ ID NO: 23480 - DNA, 40 bp, Artificial Sequence
  Description of Artificial Sequence: Synthetic primer
cagcctccagagcggatcgccagcggcgccatcaccaagg

SEQ ID NO: 23481 - DNA, 40 bp, Artificial Sequence
  Description of Artificial Sequence: Synthetic primer
ctatgtgccaggctcagagggggaagggcgctgaggttcc

SEQ ID NO: 23482 - DNA, 40 bp, Artificial Sequence
  Description of Artificial Sequence: Synthetic primer
cactttcctatggaggattccaagtcaccacttctctcac

SEQ ID NO: 23483 - DNA, 40 bp, Artificial Sequence
  Description of Artificial Sequence: Synthetic primer
agaagatgacttgaacgtttctgtcgtggtttctcctaac

SEQ ID NO: 23484 - DNA, 40 bp, Artificial Sequence
  Description of Artificial Sequence: Synthetic primer
ggtgccgggtggtccggctggtgtccaggcccgaggattg

SEQ ID NO: 23485 - DNA, 40 bp, Artificial Sequence
  Description of Artificial Sequence: Synthetic primer
gctcgctatggcgtcgctcaccgtgaaggcctaccttctg

SEQ ID NO: 23486 - DNA, 40 bp, Artificial Sequence
  Description of Artificial Sequence: Synthetic primer
tccctggttcccagcccagaatgtttctgttgggtaactg

SEQ ID NO: 23487 - DNA, 40 bp, Artificial Sequence
  Description of Artificial Sequence: Synthetic primer
tggcaagttatgtttagctgagtaacagtggcaaggagag

SEQ ID NO: 23488 - DNA, 40 bp, Artificial Sequence
  Description of Artificial Sequence: Synthetic primer
tggcagttgtgggagccaccccggcagggtcagcactttc

SEQ ID NO: 23489 - DNA, 40 bp, Artificial Sequence
  Description of Artificial Sequence: Synthetic primer
gagatgccagtgacaacatacagttcatgactaggtttag

SEQ ID NO: 23490 - DNA, 40 bp, Artificial Sequence
  Description of Artificial Sequence: Synthetic primer
cagtggaggggaatactccagctcacaggggaagtcaaag

SEQ ID NO: 23491 - DNA, 40 bp, Artificial Sequence
  Description of Artificial Sequence: Synthetic primer
gatgcggtcggtctccaccggttcctttttcacttcaaac

SEQ ID NO: 23492 - DNA, 40 bp, Artificial Sequence
  Description of Artificial Sequence: Synthetic primer
gtgaaactggtagacagaaacaccttattaaaagagagag

SEQ ID NO: 23493 - DNA, 40 bp, Artificial Sequence
  Description of Artificial Sequence: Synthetic primer
aaattatttagatcccatatgtagatttcagattcattag

SEQ ID NO: 23494 - DNA, 40 bp, Artificial Sequence
  Description of Artificial Sequence: Synthetic primer
gctagtcctagctcccagtctgctgcagcttcttcactcg

SEQ ID NO: 23495 - DNA, 40 bp, Artificial Sequence
  Description of Artificial Sequence: Synthetic primer
gtttttaaagaatgaagtggaacggctgaagaagcaactg

SEQ ID NO: 23496 - DNA, 40 bp, Artificial Sequence
  Description of Artificial Sequence: Synthetic primer
ggcaggagaagttcttccagaaagagcaggccctctccac

SEQ ID NO: 23497 - DNA, 40 bp, Artificial Sequence
  Description of Artificial Sequence: Synthetic primer
ttggcaccagctacatcaatccttgagtatcctattgaac

SEQ ID NO: 23498 - DNA, 40 bp, Artificial Sequence
  Description of Artificial Sequence: Synthetic primer
aatcaccatttggaaggaacagtacagagttgtacaggag

SEQ ID NO: 23499 - DNA, 40 bp, Artificial Sequence
  Description of Artificial Sequence: Synthetic primer
gctgcaaagctgggtttggacacgtttgtgtcagttttag

SEQ ID NO: 23500 - DNA, 40 bp, Artificial Sequence
  Description of Artificial Sequence: Synthetic primer
aagcccctgtttgaaaggaattccagacacacctttatcc

SEQ ID NO: 23501 - DNA, 40 bp, Artificial Sequence
  Description of Artificial Sequence: Synthetic primer
ggcccctattcctgtaacggtcaagcgagagcctgaagag

SEQ ID NO: 23502 - DNA, 40 bp, Artificial Sequence
  Description of Artificial Sequence: Synthetic primer
agcttcaatatttttctaaagaaattacaggtgggatatg

SEQ ID NO: 23503 - DNA, 40 bp, Artificial Sequence
  Description of Artificial Sequence: Synthetic primer
ctctgtaattgtagcatcaaaatgacaacagcagcagagc

SEQ ID NO: 23504 - DNA, 40 bp, Artificial Sequence
  Description of Artificial Sequence: Synthetic primer
gggcttctatttgagaggttcttctattacactctgtttc

SEQ ID NO: 23505 - DNA, 40 bp, Artificial Sequence
  Description of Artificial Sequence: Synthetic primer
gatgtaaatgataaccaccaaatctcaaaaatatactcac

SEQ ID NO: 23506 - DNA, 40 bp, Artificial Sequence
  Description of Artificial Sequence: Synthetic primer
aaccctaaatgctccggtggtgacgtgcacgcgcgtgcac

SEQ ID NO: 23507 - DNA, 40 bp, Artificial Sequence
  Description of Artificial Sequence: Synthetic primer
gtctccctgcgtgtctcccaagaccacggaccccgaggag

SEQ ID NO: 23508 - DNA, 40 bp, Artificial Sequence
  Description of Artificial Sequence: Synthetic primer
gttgggtatcaacagtggcaccaaggattatgtttccatc

SEQ ID NO: 23509 - DNA, 40 bp, Artificial Sequence
  Description of Artificial Sequence: Synthetic primer
gatgggacatcttttggagagtatggcggctggtacaaag

SEQ ID NO: 23510 - DNA, 40 bp, Artificial Sequence
  Description of Artificial Sequence: Synthetic primer
cttttgcattgatgaattttgtatctgcttccattaaaag

SEQ ID NO: 23511 - DNA, 40 bp, Artificial Sequence
  Description of Artificial Sequence: Synthetic primer
ggttctttttcttgtcattaacacattgttatttctgtag

SEQ ID NO: 23512 - DNA, 40 bp, Artificial Sequence
  Description of Artificial Sequence: Synthetic primer
tgatgaatcattgttccctgcagctaatatgaatgaacac

SEQ ID NO: 23513 - DNA, 40 bp, Artificial Sequence
  Description of Artificial Sequence: Synthetic primer
aatttttggcctgaaatgtttacatctggggtaacttcac

SEQ ID NO: 23514 - DNA, 40 bp, Artificial Sequence
  Description of Artificial Sequence: Synthetic primer
ctcgaacactcgctctgccccagcagcccctctcctccac

SEQ ID NO: 23515 - DNA, 40 bp, Artificial Sequence
  Description of Artificial Sequence: Synthetic primer
ctttgcattatttttcactatgattcttctaaaagtcacc

SEQ ID NO: 23516 - DNA, 40 bp, Artificial Sequence
  Description of Artificial Sequence: Synthetic primer
tctgtcctgcagaagctgatggctggacaatggttacagg

SEQ ID NO: 23517 - DNA, 40 bp, Artificial Sequence
  Description of Artificial Sequence: Synthetic primer
gggtgagaatgttacaattgagtctgtggctgattacttc

SEQ ID NO: 23518 - DNA, 40 bp, Artificial Sequence
  Description of Artificial Sequence: Synthetic primer
cgcctcctgctccacgtcaccaggcaacactcggctccac

SEQ ID NO: 23519 - DNA, 40 bp, Artificial Sequence
  Description of Artificial Sequence: Synthetic primer
ctcgttgagtttcttgtgggtacttgaaatctctatgagg

SEQ ID NO: 23520 - DNA, 40 bp, Artificial Sequence
  Description of Artificial Sequence: Synthetic primer
ttcaccatttcaacaacgatgcctatagcacagaacatgc

SEQ ID NO: 23521 - DNA, 40 bp, Artificial Sequence
  Description of Artificial Sequence: Synthetic primer
ttagcgcttccttctgtactttgcctattaatgttttgtc

SEQ ID NO: 23522 - DNA, 40 bp, Artificial Sequence
  Description of Artificial Sequence: Synthetic primer
cagcaaccatggcagccaatctcccaggaatgtggaggag

SEQ ID NO: 23523 - DNA, 40 bp, Artificial Sequence
  Description of Artificial Sequence: Synthetic primer
cttctttaaacagtggacacaaacatattttctaattttc

SEQ ID NO: 23524 - DNA, 40 bp, Artificial Sequence
  Description of Artificial Sequence: Synthetic primer
catatgatattctcagctgatgaaaaggtgctttgtaccg

SEQ ID NO: 23525 - DNA, 40 bp, Artificial Sequence
  Description of Artificial Sequence: Synthetic primer
gcagccgccaccaccgccaatacctgcaaatgggcaacag

SEQ ID NO: 23526 - DNA, 40 bp, Artificial Sequence
  Description of Artificial Sequence: Synthetic primer
tcaagatgtgctggccagatggactgatgggctgctatac

SEQ ID NO: 23527 - DNA, 40 bp, Artificial Sequence
  Description of Artificial Sequence: Synthetic primer
aggtagaaccatcatgaaaatgacccacagtgaacttatg

SEQ ID NO: 23528 - DNA, 40 bp, Artificial Sequence
  Description of Artificial Sequence: Synthetic primer
ctgagactggcggttattcacctggttatcgctcttgtgg

SEQ ID NO: 23529 - DNA, 40 bp, Artificial Sequence
  Description of Artificial Sequence: Synthetic primer
caccatagagacaacccctcgctagacgtgaactcagaac

SEQ ID NO: 23530 - DNA, 40 bp, Artificial Sequence
  Description of Artificial Sequence: Synthetic primer
catcaggattgcctaatatacctgtccagacaatctccag

SEQ ID NO: 23531 - DNA, 40 bp, Artificial Sequence
  Description of Artificial Sequence: Synthetic primer
ctttttatgaaaaggacaaaacactggtcgctggctggtg

SEQ ID NO: 23532 - DNA, 40 bp, Artificial Sequence
  Description of Artificial Sequence: Synthetic primer
gcacttccaggatatcatttgggtgaaacttgggaactac

SEQ ID NO: 23533 - DNA, 40 bp, Artificial Sequence
  Description of Artificial Sequence: Synthetic primer
cgccagtagtgtcgggagcaagttcagcaaaactcaaacc

SEQ ID NO: 23534 - DNA, 40 bp, Artificial Sequence
  Description of Artificial Sequence: Synthetic primer
cgctgccattggcttctcagatgtatttcaaggactaaag

SEQ ID NO: 23535 - DNA, 40 bp, Artificial Sequence
  Description of Artificial Sequence: Synthetic primer
aggccgctcagaagtgtgcacctgcttgatatgtccgttc

SEQ ID NO: 23536 - DNA, 40 bp, Artificial Sequence
  Description of Artificial Sequence: Synthetic primer
ctgcttgtatgaacagtcacaagacaaaatatgcaaaatc

SEQ ID NO: 23537 - DNA, 40 bp, Artificial Sequence
  Description of Artificial Sequence: Synthetic primer
attctggttgaggctgttgagcacgatgaacttgtatttc

SEQ ID NO: 23538 - DNA, 40 bp, Artificial Sequence
  Description of Artificial Sequence: Synthetic primer
atattcaccagatattatattgaccattctctttaacttc

SEQ ID NO: 23539 - DNA, 40 bp, Artificial Sequence
  Description of Artificial Sequence: Synthetic primer
atccggctgttgaggaactcttcacgaggaggcttgatgg

SEQ ID NO: 23540 - DNA, 40 bp, Artificial Sequence
  Description of Artificial Sequence: Synthetic primer
ggtcgctttgtgaatgttctccatggctagaagcttggac

SEQ ID NO: 23541 - DNA, 40 bp, Artificial Sequence
  Description of Artificial Sequence: Synthetic primer
actcacaggaccaccgtccccctagcggtgctcagaaacc

SEQ ID NO: 23542 - DNA, 40 bp, Artificial Sequence
  Description of Artificial Sequence: Synthetic primer
tagcgaggtacgtctagaaggcgactggactctgctgtag

SEQ ID NO: 23543 - DNA, 40 bp, Artificial Sequence
  Description of Artificial Sequence: Synthetic primer
cgatgtcaaagacaaactgggggttcttcaggatgttcac

SEQ ID NO: 23544 - DNA, 40 bp, Artificial Sequence
  Description of Artificial Sequence: Synthetic primer
ttggcccagctggagcaagaggagagcctggcaacattgg

SEQ ID NO: 23545 - DNA, 40 bp, Artificial Sequence
  Description of Artificial Sequence: Synthetic primer
catctggcaaataagcttctgtctttttctttccaggtag

SEQ ID NO: 23546 - DNA, 40 bp, Artificial Sequence
  Description of Artificial Sequence: Synthetic primer
atgaacacgatacattgtaggaaagtatttttccattagc

SEQ ID NO: 23547 - DNA, 40 bp, Artificial Sequence
  Description of Artificial Sequence: Synthetic primer
gattttgaactagcagtgcaaaatatcgtttatcgtacag

SEQ ID NO: 23548 - DNA, 40 bp, Artificial Sequence
  Description of Artificial Sequence: Synthetic primer
ccaccacctctccatcttcttggacgatgtcttccatctc

SEQ ID NO: 23549 - DNA, 40 bp, Artificial Sequence
  Description of Artificial Sequence: Synthetic primer
ctgctcggcgaggctgtggtgggatctgggaagatggaag

SEQ ID NO: 23550 - DNA, 40 bp, Artificial Sequence
  Description of Artificial Sequence: Synthetic primer
gctctttctctctctccacggtttctctccttttcttctc

SEQ ID NO: 23551 - DNA, 40 bp, Artificial Sequence
  Description of Artificial Sequence: Synthetic primer
acagtcccacttccccatctccccaagtaggtggtgttag

SEQ ID NO: 23552 - DNA, 40 bp, Artificial Sequence
  Description of Artificial Sequence: Synthetic primer
atttttaatgatagggtacttaaagttttggtggtccttg

SEQ ID NO: 23553 - DNA, 40 bp, Artificial Sequence
  Description of Artificial Sequence: Synthetic primer
acacatctaattttatctgtagtttaagtgatctaaattg

SEQ ID NO: 23554 - DNA, 40 bp, Artificial Sequence
  Description of Artificial Sequence: Synthetic primer
caccaggtgcttcctctggccaatcctccctagccttgag

SEQ ID NO: 23555 - DNA, 40 bp, Artificial Sequence
  Description of Artificial Sequence: Synthetic primer
gtttttttaccacctggtgaatcagccataacgcacacac

SEQ ID NO: 23556 - DNA, 40 bp, Artificial Sequence
  Description of Artificial Sequence: Synthetic primer
ggcagggggtaccaggatctgtacgttggactgtttgatg

SEQ ID NO: 23557 - DNA, 40 bp, Artificial Sequence
  Description of Artificial Sequence: Synthetic primer
attctgcaccatgtggaaacgctcaccagccactgtgatg

SEQ ID NO: 23558 - DNA, 40 bp, Artificial Sequence
  Description of Artificial Sequence: Synthetic primer
atcccggacacccgcgtccactgctgcctctacttcatcc

SEQ ID NO: 23559 - DNA, 40 bp, Artificial Sequence
  Description of Artificial Sequence: Synthetic primer
ggcattacatgttgacaaactaatgtgtagtggtcttttg

SEQ ID NO: 23560 - DNA, 40 bp, Artificial Sequence
  Description of Artificial Sequence: Synthetic primer
cggaattctgataacacctgaaggtagggcatgactgtgg

SEQ ID NO: 23561 - DNA, 40 bp, Artificial Sequence
  Description of Artificial Sequence: Synthetic primer
aagcagcagttgaaaaactcctagaagccataagtgaaac

SEQ ID NO: 23562 - DNA, 40 bp, Artificial Sequence
  Description of Artificial Sequence: Synthetic primer
tcatggtttggatttgggaaagtaaaatcaagacaaggtg

SEQ ID NO: 23563 - DNA, 40 bp, Artificial Sequence
  Description of Artificial Sequence: Synthetic primer
tggacaaggagatggcggccacttcagctgctattgaaac

SEQ ID NO: 23564 - DNA, 40 bp, Artificial Sequence
  Description of Artificial Sequence: Synthetic primer
atctcggaggggccgctgggggaggaagaacagaaaaacc

SEQ ID NO: 23565 - DNA, 40 bp, Artificial Sequence
  Description of Artificial Sequence: Synthetic primer
tacgcgtcgcgtatctgagcgctctcgccacttcaactgc

SEQ ID NO: 23566 - DNA, 40 bp, Artificial Sequence
  Description of Artificial Sequence: Synthetic primer
ggaacaaaattgctattattcaccccaatgcattttccac

SEQ ID NO: 23567 - DNA, 40 bp, Artificial Sequence
  Description of Artificial Sequence: Synthetic primer
gaaagccatcagtaaattgacaaccaggacagtaaagaag

SEQ ID NO: 23568 - DNA, 40 bp, Artificial Sequence
  Description of Artificial Sequence: Synthetic primer
ttgtcttataagcattaaaaattaaagaacaagcaaacac

SEQ ID NO: 23569 - DNA, 40 bp, Artificial Sequence
  Description of Artificial Sequence: Synthetic primer
cagcttgttcacattcttcaatgagattattggcttcttc

SEQ ID NO: 23570 - DNA, 40 bp, Artificial Sequence
  Description of Artificial Sequence: Synthetic primer
ctgaatggttttcaaagttagctgccctctcatcaaatac

SEQ ID NO: 23571 - DNA, 40 bp, Artificial Sequence
  Description of Artificial Sequence: Synthetic primer
atatgaaaaaggagcaagacccccctgccaagtgccacac

SEQ ID NO: 23572 - DNA, 40 bp, Artificial Sequence
  Description of Artificial Sequence: Synthetic primer
cctggaggagaagtcatctcatgacaacagaagggaggtg

SEQ ID NO: 23573 - DNA, 40 bp, Artificial Sequence
  Description of Artificial Sequence: Synthetic primer
aattttctcttacctgtaaagtaaaatttagatcaattcc

SEQ ID NO: 23574 - DNA, 40 bp, Artificial Sequence
  Description of Artificial Sequence: Synthetic primer
tgtgcaatagatgatgatctccaggtacaggggcgaggtc

SEQ ID NO: 23575 - DNA, 40 bp, Artificial Sequence
  Description of Artificial Sequence: Synthetic primer
gatccagcgtcggttcccctcgcccacgcccaccaacaac

SEQ ID NO: 23576 - DNA, 40 bp, Artificial Sequence
  Description of Artificial Sequence: Synthetic primer
gagagacttctaggaatctttttcttctcatagcgaagtc

SEQ ID NO: 23577 - DNA, 40 bp, Artificial Sequence
  Description of Artificial Sequence: Synthetic primer
ctgtatgattgaaataaagagaaataaacaaatctagcag

SEQ ID NO: 23578 - DNA, 40 bp, Artificial Sequence
  Description of Artificial Sequence: Synthetic primer
gggcagcttaaaatgtggtcacctgtgggggaaactcttc

SEQ ID NO: 23579 - DNA, 40 bp, Artificial Sequence
  Description of Artificial Sequence: Synthetic primer
tttgctctgccctatcctgtataagttggggtcaagttcc

SEQ ID NO: 23580 - DNA, 40 bp, Artificial Sequence
  Description of Artificial Sequence: Synthetic primer
gacatacgaccagctgtgtctgatgtcataaaacacgtgt

SEQ ID NO: 23581 - DNA, 40 bp, Artificial Sequence
  Description of Artificial Sequence: Synthetic primer
acatgagacaataaacagaaagccatctgctgcctccaag

SEQ ID NO: 23582 - DNA, 40 bp, Artificial Sequence
  Description of Artificial Sequence: Synthetic primer
agaaatgattggttctgttcttatgttgagggacctcgtg

SEQ ID NO: 23583 - DNA, 40 bp, Artificial Sequence
  Description of Artificial Sequence: Synthetic primer
cctcgggcagtgacaccacctacttctccgtcaatgtttc

SEQ ID NO: 23584 - DNA, 40 bp, Artificial Sequence
  Description of Artificial Sequence: Synthetic primer
agacatttatattggctataaaaggcagtgagaggaaagg

SEQ ID NO: 23585 - DNA, 40 bp, Artificial Sequence
  Description of Artificial Sequence: Synthetic primer
aggttgacagaaatcctccgagtactggtccagccaggtg

SEQ ID NO: 23586 - DNA, 40 bp, Artificial Sequence
  Description of Artificial Sequence: Synthetic primer
caacaatcttcctataacgcttgtccaggaaagggaaacc

SEQ ID NO: 23587 - DNA, 40 bp, Artificial Sequence
  Description of Artificial Sequence: Synthetic primer
ataggacctacaatgtcgtcgcttattttcaagaaagaac

SEQ ID NO: 23588 - DNA, 40 bp, Artificial Sequence
  Description of Artificial Sequence: Synthetic primer
cttccaagatgatgactttctgctctgatctggggttgac

SEQ ID NO: 23589 - DNA, 40 bp, Artificial Sequence
  Description of Artificial Sequence: Synthetic primer
tcacacaaacagcccaagccctaggcacaaatactcaatg

SEQ ID NO: 23590 - DNA, 40 bp, Artificial Sequence
  Description of Artificial Sequence: Synthetic primer
tcagatctcgtcagccatggagtacctggagaagaaaaac

SEQ ID NO: 23591 - DNA, 40 bp, Artificial Sequence
  Description of Artificial Sequence: Synthetic primer
tccagtcggaccacgctggggagaatcctcaatcccttac

SEQ ID NO: 23592 - DNA, 40 bp, Artificial Sequence
  Description of Artificial Sequence: Synthetic primer
aattaactctcttgatcatatagatatctctatgaaaatc

SEQ ID NO: 23593 - DNA, 40 bp, Artificial Sequence
  Description of Artificial Sequence: Synthetic primer
gagaattaactgcttcagaaatgactaataaatgaaaaac

SEQ ID NO: 23594 - DNA, 40 bp, Artificial Sequence
  Description of Artificial Sequence: Synthetic primer
ccggactccgggcagcgggagggccggggcgcgactaagg

SEQ ID NO: 23595 - DNA, 40 bp, Artificial Sequence
  Description of Artificial Sequence: Synthetic primer
cttttagaagtagctttctgtttaggtttttctcttttgg

SEQ ID NO: 23596 - DNA, 40 bp, Artificial Sequence
  Description of Artificial Sequence: Synthetic primer
aacctggtgcccctggtgaaaatggaactccaggtcaaac

SEQ ID NO: 23597 - DNA, 40 bp, Artificial Sequence
  Description of Artificial Sequence: Synthetic primer
tttgtacattggttgaacaagaattactgtatctgagaag

SEQ ID NO: 23598 - DNA, 40 bp, Artificial Sequence
  Description of Artificial Sequence: Synthetic primer
cgccacctgctcccggcctgctccggccccgtgccaccag

SEQ ID NO: 23599 - DNA, 40 bp, Artificial Sequence
  Description of Artificial Sequence: Synthetic primer
ggacagcaaatttgggagatggaagccacggtggataagg

SEQ ID NO: 23600 - DNA, 40 bp, Artificial Sequence
  Description of Artificial Sequence: Synthetic primer
cggcccagtgtgttgtccttcttgtctatgagactcatgg

SEQ ID NO: 23601 - DNA, 40 bp, Artificial Sequence
  Description of Artificial Sequence: Synthetic primer
aaaagaggatacgaatgggacttgaagttataccagtaac

SEQ ID NO: 23602 - DNA, 40 bp, Artificial Sequence
  Description of Artificial Sequence: Synthetic primer
ggttgtgtcaccagaagcagctgctaaggcagctgcaaag

SEQ ID NO: 23603 - DNA, 40 bp, Artificial Sequence
  Description of Artificial Sequence: Synthetic primer
accaggaactcagtcatgtttttgtcctggataatctacc

SEQ ID NO: 23604 - DNA, 40 bp, Artificial Sequence
  Description of Artificial Sequence: Synthetic primer
gaagacaccagctaatctagaaacaatgctaacttttaac

SEQ ID NO: 23605 - DNA, 40 bp, Artificial Sequence
  Description of Artificial Sequence: Synthetic primer
gtccatcatacggtagagttgaacacagaggtggatcagg

SEQ ID NO: 23606 - DNA, 40 bp, Artificial Sequence
  Description of Artificial Sequence: Synthetic primer
gttttatcacataacatctgaataccagaaatgaagatac

SEQ ID NO: 23607 - DNA, 40 bp, Artificial Sequence
  Description of Artificial Sequence: Synthetic primer
ccaatggaaattcccgtgttgcttcaaactgagacagatg

SEQ ID NO: 23608 - DNA, 40 bp, Artificial Sequence
  Description of Artificial Sequence: Synthetic primer
catgcatgctgttgacttttaggactttgatcttttaagg

SEQ ID NO: 23609 - DNA, 40 bp, Artificial Sequence
  Description of Artificial Sequence: Synthetic primer
cccttcgtcctcctctttgccaagcaggtctaatagcttc

SEQ ID NO: 23610 - DNA, 40 bp, Artificial Sequence
  Description of Artificial Sequence: Synthetic primer
accattccccgctcggctgtgctagaggcagacgacactc

SEQ ID NO: 23611 - DNA, 40 bp, Artificial Sequence
  Description of Artificial Sequence: Synthetic primer
atctgtaaaagctgctgctgaaaagccaactgctgggtag

SEQ ID NO: 23612 - DNA, 40 bp, Artificial Sequence
  Description of Artificial Sequence: Synthetic primer
accaacctagcataatcctggcgtagtttatttagttctg

SEQ ID NO: 23613 - DNA, 40 bp, Artificial Sequence
  Description of Artificial Sequence: Synthetic primer
cttgggatttctccaaagactctaatttattcttgtgttc

SEQ ID NO: 23614 - DNA, 40 bp, Artificial Sequence
  Description of Artificial Sequence: Synthetic primer
attatcttcacttctttcactgaaccatatctagcaaaga

SEQ ID NO: 23615 - DNA, 40 bp, Artificial Sequence
  Description of Artificial Sequence: Synthetic primer
ctaacaaattacataaactaaagggggattttctttcttc

SEQ ID NO: 23616 - DNA, 40 bp, Artificial Sequence
  Description of Artificial Sequence: Synthetic primer
gacttcaccaggacaattcctcaaatggaaagtctgaatg

SEQ ID NO: 23617 - DNA, 40 bp, Artificial Sequence
  Description of Artificial Sequence: Synthetic primer
ggcgggcgtgcggtcggcggcagggcggagcgcggcagag

SEQ ID NO: 23618 - DNA, 40 bp, Artificial Sequence
  Description of Artificial Sequence: Synthetic primer
gaagccttcttgcctcatataaatggagtggcagctaggc

SEQ ID NO: 23619 - DNA, 40 bp, Artificial Sequence
  Description of Artificial Sequence: Synthetic primer
tatttaatatatgccgattgtttgaactaatctggattta

SEQ ID NO: 23620 - DNA, 40 bp, Artificial Sequence
  Description of Artificial Sequence: Synthetic primer
cagtccagatgactccaagtcttccctgccaccactagac

SEQ ID NO: 23621 - DNA, 40 bp, Artificial Sequence
  Description of Artificial Sequence: Synthetic primer
cactggagacactcactacatattctgtaccaggcaggag

SEQ ID NO: 23622 - DNA, 40 bp, Artificial Sequence
  Description of Artificial Sequence: Synthetic primer
tcaacaaatacttttacatttgacattactgaggtcattc

SEQ ID NO: 23623 - DNA, 40 bp, Artificial Sequence
  Description of Artificial Sequence: Synthetic primer
ccccatgtctaacaaggaagaagtcaaaagcaaaagatag

SEQ ID NO: 23624 - DNA, 40 bp, Artificial Sequence
  Description of Artificial Sequence: Synthetic primer
caaaaagtagaaaaatcaaaaatactcccaaatggggttc

SEQ ID NO: 23625 - DNA, 40 bp, Artificial Sequence
  Description of Artificial Sequence: Synthetic primer
aattgaggtccttctcccaaatagtatcacaacctacttc

SEQ ID NO: 23626 - DNA, 40 bp, Artificial Sequence
  Description of Artificial Sequence: Synthetic primer
ggaaaaaacacatgcatagtccaaatacaatgttgaaaac

SEQ ID NO: 23627 - DNA, 40 bp, Artificial Sequence
  Description of Artificial Sequence: Synthetic primer
ccaagaatgtaagaatcctggtggttcccccaatgtgatg

SEQ ID NO: 23628 - DNA, 40 bp, Artificial Sequence
  Description of Artificial Sequence: Synthetic primer
tccaggttttctttccctagctcctcccctccccctgtcc

SEQ ID NO: 23629 - DNA, 40 bp, Artificial Sequence
  Description of Artificial Sequence: Synthetic primer
gaggtacaacatagctcctttgctccccaacaggccactg

SEQ ID NO: 23630 - DNA, 40 bp, Artificial Sequence
  Description of Artificial Sequence: Synthetic primer
agctcatcagagggtaaagttcacaaaagaccacactgtc

SEQ ID NO: 23631 - DNA, 40 bp, Artificial Sequence
  Description of Artificial Sequence: Synthetic primer
tgccgctgcgacactgtccgagtgatgccgggggctttgg

SEQ ID NO: 23632 - DNA, 40 bp, Artificial Sequence
  Description of Artificial Sequence: Synthetic primer
ggtacttattactgctaagtatttcccagcacatgaaacc

SEQ ID NO: 23633 - DNA, 40 bp, Artificial Sequence
  Description of Artificial Sequence: Synthetic primer
gggaaaggtgttccacttacttcttgaggtacaaaaactg

SEQ ID NO: 23634 - DNA, 40 bp, Artificial Sequence
  Description of Artificial Sequence: Synthetic primer
cagcttcactcacccaggctagaggcatggacaaataaac

SEQ ID NO: 23635 - DNA, 40 bp, Artificial Sequence
  Description of Artificial Sequence: Synthetic primer
aacagctttttacctgataattctcttcctgtattaaatc

SEQ ID NO: 23636 - DNA, 40 bp, Artificial Sequence
  Description of Artificial Sequence: Synthetic primer
ctgggggcctgggaggaagggtcccaaatggcctgctttc

SEQ ID NO: 23637 - DNA, 40 bp, Artificial Sequence
  Description of Artificial Sequence: Synthetic primer
cggcgatcgctgactcgccgggtccgggggctctggaagc

SEQ ID NO: 23638 - DNA, 40 bp, Artificial Sequence
  Description of Artificial Sequence: Synthetic primer
tgaaatggaactgtttaacttcacggatttcattgtaccc

SEQ ID NO: 23639 - DNA, 40 bp, Artificial Sequence
  Description of Artificial Sequence: Synthetic primer
cactgaagtgggccacccaacttccccacattcctgtagc

SEQ ID NO: 23640 - DNA, 40 bp, Artificial Sequence
  Description of Artificial Sequence: Synthetic primer
tgctgtgcagcatatggggcagactgggcattgtaagagg

SEQ ID NO: 23641 - DNA, 40 bp, Artificial Sequence
  Description of Artificial Sequence: Synthetic primer
caaccattgctgaatccaggagatgcaagatgacaatgag

SEQ ID NO: 23642 - DNA, 40 bp, Artificial Sequence
  Description of Artificial Sequence: Synthetic primer
gcactttcttgccaaagccgcgcggcactgcgtgcatggc

SEQ ID NO: 23643 - DNA, 40 bp, Artificial Sequence
  Description of Artificial Sequence: Synthetic primer
ctcagagtttactctgtacgaatcacggctgttggacatc

SEQ ID NO: 23644 - DNA, 40 bp, Artificial Sequence
  Description of Artificial Sequence: Synthetic primer
tgtccagatctgaccgtagcttctctttttctctgaccac

SEQ ID NO: 23645 - DNA, 40 bp, Artificial Sequence
  Description of Artificial Sequence: Synthetic primer
atcattaatgaaatcctgaactttattctgtgtaattgtg

SEQ ID NO: 23646 - DNA, 40 bp, Artificial Sequence
  Description of Artificial Sequence: Synthetic primer
gtcctccccttggaggggcacaaacgatcagtaagaatac

SEQ ID NO: 23647 - DNA, 40 bp, Artificial Sequence
  Description of Artificial Sequence: Synthetic primer
ggcccggcagcaccagtagcaccatcatttccacgagcac

SEQ ID NO: 23648 - DNA, 40 bp, Artificial Sequence
  Description of Artificial Sequence: Synthetic primer
cggctccgtctcgggctagggttccggctcggctcagaac

SEQ ID NO: 23649 - DNA, 40 bp, Artificial Sequence
  Description of Artificial Sequence: Synthetic primer
ttgcgggccatgttatatacttaactgctgactgctgaac

SEQ ID NO: 23650 - DNA, 40 bp, Artificial Sequence
  Description of Artificial Sequence: Synthetic primer
gtggaggtgttcagtggcacctctgtgggtgtgagtgatg

SEQ ID NO: 23651 - DNA, 40 bp, Artificial Sequence
  Description of Artificial Sequence: Synthetic primer
tttaatttgatttcacagcaaactaatggtgctcccactc

SEQ ID NO: 23652 - DNA, 40 bp, Artificial Sequence
  Description of Artificial Sequence: Synthetic primer
gtgcagcatctacctgaaactgctaagaaccaagatggag

SEQ ID NO: 23653 - DNA, 40 bp, Artificial Sequence
  Description of Artificial Sequence: Synthetic primer
ctgatgacctctccattgtgtgtttcacaagcggcacgac

SEQ ID NO: 23654 - DNA, 40 bp, Artificial Sequence
  Description of Artificial Sequence: Synthetic primer
tctgtatttgcaactatggatttgtagggaacgggaggac

SEQ ID NO: 23655 - DNA, 40 bp, Artificial Sequence
  Description of Artificial Sequence: Synthetic primer
ctgtgcggaggcaacgtggccggaagaaatgaatactatc

SEQ ID NO: 23656 - DNA, 40 bp, Artificial Sequence
  Description of Artificial Sequence: Synthetic primer
gtgctttttctaaagacgcagaaacgacgtcgccgtaaag

SEQ ID NO: 23657 - DNA, 40 bp, Artificial Sequence
  Description of Artificial Sequence: Synthetic primer
cagctgcccttttgtaagaagcacttttcccaaataaaac

SEQ ID NO: 23658 - DNA, 40 bp, Artificial Sequence
  Description of Artificial Sequence: Synthetic primer
acagcgtgacgtgaacagagccatgtaaagtctcgatgtc

SEQ ID NO: 23659 - DNA, 40 bp, Artificial Sequence
  Description of Artificial Sequence: Synthetic primer
cccaaaggaaggcgagggccctttttggtgattcatctgg

SEQ ID NO: 23660 - DNA, 40 bp, Artificial Sequence
  Description of Artificial Sequence: Synthetic primer
gtagaggtggtcaaagaactagatttgggttaagttcctg

SEQ ID NO: 23661 - DNA, 40 bp, Artificial Sequence
  Description of Artificial Sequence: Synthetic primer
cacagtctggagtgatagctactgtagaaaggaaatagac

SEQ ID NO: 23662 - DNA, 40 bp, Artificial Sequence
  Description of Artificial Sequence: Synthetic primer
agatcaagttggggagttctttaaacaaataggaattatc

SEQ ID NO: 23663 - DNA, 40 bp, Artificial Sequence
  Description of Artificial Sequence: Synthetic primer
gcctgaaccttccctgtatcgatcctttaatttagaactg

SEQ ID NO: 23664 - DNA, 40 bp, Artificial Sequence
  Description of Artificial Sequence: Synthetic primer
gcaggccaaagagctgtttcttcttcgaaagacattggag

SEQ ID NO: 23665 - DNA, 40 bp, Artificial Sequence
  Description of Artificial Sequence: Synthetic primer
ggcttggtggtgtcccaggagttggtggcttaggagtgtc

SEQ ID NO: 23666 - DNA, 40 bp, Artificial Sequence
  Description of Artificial Sequence: Synthetic primer
caaatgtgcacattacataaattaagtccactgatacaac

SEQ ID NO: 23667 - DNA, 40 bp, Artificial Sequence
  Description of Artificial Sequence: Synthetic primer
tctcctgccaccgaggcagcttggaattcagtagttctgc

SEQ ID NO: 23668 - DNA, 40 bp, Artificial Sequence
  Description of Artificial Sequence: Synthetic primer
accccgggccagctacgacgatccctacaaaaaggctgtc

SEQ ID NO: 23669 - DNA, 40 bp, Artificial Sequence
  Description of Artificial Sequence: Synthetic primer
gaatttctggatttcactctgacgagaagtaacggtctcc

SEQ ID NO: 23670 - DNA, 40 bp, Artificial Sequence
  Description of Artificial Sequence: Synthetic primer
ttttaaagaggacacaaatttggtttgagatcacaccttg

SEQ ID NO: 23671 - DNA, 40 bp, Artificial Sequence
  Description of Artificial Sequence: Synthetic primer
gaccgacgactcgtggttgggcaacaccacccagtacacc

SEQ ID NO: 23672 - DNA, 40 bp, Artificial Sequence
  Description of Artificial Sequence: Synthetic primer
gaagtgtcaccttaaacaaaatatacaataactgaaatgc

SEQ ID NO: 23673 - DNA, 40 bp, Artificial Sequence
  Description of Artificial Sequence: Synthetic primer
ttatttggggtacaaggattcatttccaatgttttaagag

SEQ ID NO: 23674 - DNA, 40 bp, Artificial Sequence
  Description of Artificial Sequence: Synthetic primer
aaggctacatttcctcctttgagaaccattagagagtgtc

SEQ ID NO: 23675 - DNA, 40 bp, Artificial Sequence
  Description of Artificial Sequence: Synthetic primer
gcctgagttgttggctcatataaaaaggccttggcaggag

SEQ ID NO: 23676 - DNA, 40 bp, Artificial Sequence
  Description of Artificial Sequence: Synthetic primer
gatcctacagccaagctccaagtcaatatagccaacagag

SEQ ID NO: 23677 - DNA, 40 bp, Artificial Sequence
  Description of Artificial Sequence: Synthetic primer
tttgtttttgtccttgaataagcatgttatgtatattgtc

SEQ ID NO: 23678 - DNA, 40 bp, Artificial Sequence
  Description of Artificial Sequence: Synthetic primer
tgcctgtatttcagcaatctttaatgtctttggggttctc

SEQ ID NO: 23679 - DNA, 40 bp, Artificial Sequence
  Description of Artificial Sequence: Synthetic primer
ctgtggtgcagttggcagccgagaccccaacagcagagag

SEQ ID NO: 23680 - DNA, 40 bp, Artificial Sequence
  Description of Artificial Sequence: Synthetic primer
agtgacaaggacaaatggatccagcgggacacgcctgtgg

SEQ ID NO: 23681 - DNA, 40 bp, Artificial Sequence
  Description of Artificial Sequence: Synthetic primer
gcgttagagtttcgcttaagcttcggaagaatggaagtgg

SEQ ID NO: 23682 - DNA, 40 bp, Artificial Sequence
  Description of Artificial Sequence: Synthetic primer
attcctgccccgcccatctttttgtgtctcgctgtgatag

SEQ ID NO: 23683 - DNA, 40 bp, Artificial Sequence
  Description of Artificial Sequence: Synthetic primer
tattgctatcattagggctatggggaggttgaagatagac

SEQ ID NO: 23684 - DNA, 40 bp, Artificial Sequence
  Description of Artificial Sequence: Synthetic primer
ggcgacctctcaacccagcctccagaaccagaaccaagag

SEQ ID NO: 23685 - DNA, 40 bp, Artificial Sequence
  Description of Artificial Sequence: Synthetic primer
gaggcgtgcacgcaaatgcgggttgcgtgtgtgtatgtgg

SEQ ID NO: 23686 - DNA, 40 bp, Artificial Sequence
  Description of Artificial Sequence: Synthetic primer
cctttcaggacatacaagagactagaacacaagaactcag

SEQ ID NO: 23687 - DNA, 40 bp, Artificial Sequence
  Description of Artificial Sequence: Synthetic primer
tgttctgatgaggaacgtccttcaaccagccgagcctgtg

SEQ ID NO: 23688 - DNA, 40 bp, Artificial Sequence
  Description of Artificial Sequence: Synthetic primer
acagcagatgaaacaaaggactatatgaatcaactttcac

SEQ ID NO: 23689 - DNA, 40 bp, Artificial Sequence
  Description of Artificial Sequence: Synthetic primer
agaattttgaatttctttagattcatttctgttaatcatc

SEQ ID NO: 23690 - DNA, 40 bp, Artificial Sequence
  Description of Artificial Sequence: Synthetic primer
gattttaaagaaatgcctggtgtatatgtatttggagaag

SEQ ID NO: 23691 - DNA, 40 bp, Artificial Sequence
  Description of Artificial Sequence: Synthetic primer
tccactgggttacagaatcacagccctcatgatcattctc

SEQ ID NO: 23692 - DNA, 40 bp, Artificial Sequence
  Description of Artificial Sequence: Synthetic primer
cgctgcaccaatcagggcaaaggtccccgaatagatgtgg

SEQ ID NO: 23693 - DNA, 40 bp, Artificial Sequence
  Description of Artificial Sequence: Synthetic primer
cacgcgccaggccgcttgcacatgcgcattaggtacaaag

SEQ ID NO: 23694 - DNA, 40 bp, Artificial Sequence
  Description of Artificial Sequence: Synthetic primer
gatggcgtaggtgccattcagctcccgctcgatggtgtag

SEQ ID NO: 23695 - DNA, 40 bp, Artificial Sequence
  Description of Artificial Sequence: Synthetic primer
gtctctccggagcgcccgcacagccggcagcccgcctcca

SEQ ID NO: 23696 - DNA, 40 bp, Artificial Sequence
  Description of Artificial Sequence: Synthetic primer
cagggatcaggatctctttgtgcccccagtaaaacttctg

SEQ ID NO: 23697 - DNA, 40 bp, Artificial Sequence; identical to SEQ ID NO: 23227
  Description of Artificial Sequence: Synthetic primer

SEQ ID NO: 23698 - DNA, 40 bp, Artificial Sequence
  Description of Artificial Sequence: Synthetic primer
tataggaagattgttgatgtcaattttcaatctctgttag

SEQ ID NO: 23699 - DNA, 40 bp, Artificial Sequence
  Description of Artificial Sequence: Synthetic primer
aaaatcaacaggcttttaatttatcagtgacattatctcc

SEQ ID NO: 23700 - DNA, 40 bp, Artificial Sequence
  Description of Artificial Sequence: Synthetic primer
tccccaagtctcagatctctttcattgactacttcataac

SEQ ID NO: 23701 - DNA, 40 bp, Artificial Sequence
  Description of Artificial Sequence: Synthetic primer
ccagcttgcacaggacatggccgaggaggcagcccagaac

SEQ ID NO: 23702 - DNA, 40 bp, Artificial Sequence
  Description of Artificial Sequence: Synthetic primer
gatggaagagctgcacaaccaagaggtgcaaaaacgaaag

SEQ ID NO: 23703 - DNA, 40 bp, Artificial Sequence
  Description of Artificial Sequence: Synthetic primer
cacccatgggaacgtggtggctgatttctcaggctttctg

SEQ ID NO: 23704 - DNA, 40 bp, Artificial Sequence
  Description of Artificial Sequence: Synthetic primer
ggtaaggtcacagtgatggggctgaattcctgggccaaac

SEQ ID NO: 23705 - DNA, 40 bp, Artificial Sequence
  Description of Artificial Sequence: Synthetic primer
tcgttgatgttgaggaactgaactactgggcctgcaaagg

SEQ ID NO: 23706 - DNA, 40 bp, Artificial Sequence
  Description of Artificial Sequence: Synthetic primer
tattgtggctttggatcgagatttccatgttcactgctac

SEQ ID NO: 23707 - DNA, 40 bp, Artificial Sequence
  Description of Artificial Sequence: Synthetic primer
agtcttcatatctttctattgtgattttggtgtatgtatg

SEQ ID NO: 23708 - DNA, 40 bp, Artificial Sequence
  Description of Artificial Sequence: Synthetic primer
gcttaaagcttgatttgatctttgtttaaatgccaaaatg

SEQ ID NO: 23709 - DNA, 40 bp, Artificial Sequence
  Description of Artificial Sequence: Synthetic primer
gaagggtgacgggcccggcgcccccggtaaccctcaggtc

SEQ ID NO: 23710 - DNA, 40 bp, Artificial Sequence
  Description of Artificial Sequence: Synthetic primer
ttcgcaaaatgcttcagcttctctccatgttcttttcatc

SEQ ID NO: 23711 - DNA, 40 bp, Artificial Sequence
  Description of Artificial Sequence: Synthetic primer
ggactaggcatgatgggtgttcctggtggccctccacctc

SEQ ID NO: 23712 - DNA, 40 bp, Artificial Sequence
  Description of Artificial Sequence: Synthetic primer
ttggaaggcttaatgaatttcatttattttctgcaacaac

SEQ ID NO: 23713 - DNA, 40 bp, Artificial Sequence
  Description of Artificial Sequence: Synthetic primer
aggtcccttcatatctcgtcctagcaattgtatctgttgg

SEQ ID NO: 23714 - DNA, 40 bp, Artificial Sequence
  Description of Artificial Sequence: Synthetic primer
ttcttggggcattttaaagaggtttatcaaagttatattg

SEQ ID NO: 23715 - DNA, 40 bp, Artificial Sequence
  Description of Artificial Sequence: Synthetic primer
tgggcagtgtggcgaagcccacgtactgcttgtcaatgtc

SEQ ID NO: 23716 - DNA, 40 bp, Artificial Sequence
  Description of Artificial Sequence: Synthetic primer
tacgaaactccagcagcaacttaaaattacaacagataac

SEQ ID NO: 23717 - DNA, 40 bp, Artificial Sequence
  Description of Artificial Sequence: Synthetic primer
ggtgtgggggtgctccctggagttcccactggagcaggag

SEQ ID NO: 23718 - DNA, 40 bp, Artificial Sequence
  Description of Artificial Sequence: Synthetic primer
cttgcgctaaatctcgagccagaaagagctctgataatcc

SEQ ID NO: 23719 - DNA, 40 bp, Artificial Sequence
  Description of Artificial Sequence: Synthetic primer
agaaaaaacaactgcaagtgaagcttgaggaggaaaagac

SEQ ID NO: 23720 - DNA, 40 bp, Artificial Sequence
  Description of Artificial Sequence: Synthetic primer
ctgctcagagagtatggcttgattgtcactgtctgttctg

SEQ ID NO: 23721 - DNA, 40 bp, Artificial Sequence
  Description of Artificial Sequence: Synthetic primer
cgaccatgctgttcaaatgttctttgtatgttttctccag

SEQ ID NO: 23722 - DNA, 40 bp, Artificial Sequence
  Description of Artificial Sequence: Synthetic primer
gctccatgaagcggtcccggtggccttgcagggtgtcagc

SEQ ID NO: 23723 - DNA, 40 bp, Artificial Sequence
  Description of Artificial Sequence: Synthetic primer
tgactcgacccaacagggtcaggtgtggatctgtgagtag

SEQ ID NO: 23724 - DNA, 40 bp, Artificial Sequence
  Description of Artificial Sequence: Synthetic primer
agcagaagcagcaaactgtgcactagcagaatccaaagtc

SEQ ID NO: 23725 - DNA, 40 bp, Artificial Sequence
  Description of Artificial Sequence: Synthetic primer
cctgtgggtcaatgtatgtatgtgtatatgtctgtataac

SEQ ID NO: 23726 - DNA, 40 bp, Artificial Sequence
  Description of Artificial Sequence: Synthetic primer
ttgcttttatttaccactgagatattttccccttattctg

SEQ ID NO: 23727 - DNA, 40 bp, Artificial Sequence
  Description of Artificial Sequence: Synthetic primer
ggcccagtggccagatcgtccacacttgaagcactcattg

SEQ ID NO: 23728 - DNA, 40 bp, Artificial Sequence
  Description of Artificial Sequence: Synthetic primer
gttggtttactaaactgtttggaacagagaatacaagaac

SEQ ID NO: 23729 - DNA, 40 bp, Artificial Sequence
  Description of Artificial Sequence: Synthetic primer
actgggactaaaaccttgtgaaatcaaaagacaggaagtg

SEQ ID NO: 23730 - DNA, 40 bp, Artificial Sequence
  Description of Artificial Sequence: Synthetic primer
ttcctggtgtgcactaccaaattcttggaaaagctacatt

SEQ ID NO: 23731 - DNA, 40 bp, Artificial Sequence
  Description of Artificial Sequence: Synthetic primer
gagagtgtgatcctagttgttttatcctccagagatagtc

SEQ ID NO: 23732 - DNA, 40 bp, Artificial Sequence
  Description of Artificial Sequence: Synthetic primer
tgagaaggcattctgacattctcaaacgtaaccagtttgc

SEQ ID NO: 23733 - DNA, 40 bp, Artificial Sequence
  Description of Artificial Sequence: Synthetic primer
ctgttgaaggactccaggaagcatttcagccagctgatcc

SEQ ID NO: 23734 - DNA, 40 bp, Artificial Sequence
  Description of Artificial Sequence: Synthetic primer
ccctttgcggacagcgtctccctcgactccgcttaggaag

SEQ ID NO: 23735 - DNA, 40 bp, Artificial Sequence
  Description of Artificial Sequence: Synthetic primer
agtgggactccaggttgcggtcccccaaagggtccaactc

SEQ ID NO: 23736 - DNA, 40 bp, Artificial Sequence
  Description of Artificial Sequence: Synthetic primer
tgagagaagtcagcccacccacagccctgaccctcacctc

SEQ ID NO: 23737 - DNA, 40 bp, Artificial Sequence
  Description of Artificial Sequence: Synthetic primer
tatggagaattctacaagagcctcactaatgactgggaag

SEQ ID NO: 23738 - DNA, 40 bp, Artificial Sequence
  Description of Artificial Sequence: Synthetic primer
ttctcgcatgaaggagacacagaagtccatctattacatc

SEQ ID NO: 23739 - DNA, 40 bp, Artificial Sequence
  Description of Artificial Sequence: Synthetic primer
ttgccacacttttaatgtcactatctgctaccattacttc

SEQ ID NO: 23740 - DNA, 40 bp, Artificial Sequence
  Description of Artificial Sequence: Synthetic primer
agaattcattataataagaagtccatgaacatacacacac

SEQ ID NO: 23741 - DNA, 40 bp, Artificial Sequence
  Description of Artificial Sequence: Synthetic primer
ttggaagaggttgagttcacactccaggtagtcaaacatc

SEQ ID NO: 23742 - DNA, 40 bp, Artificial Sequence
  Description of Artificial Sequence: Synthetic primer
gttcactaagccagggatccacgcaggatttgtggaaaac

SEQ ID NO: 23743 - DNA, 40 bp, Artificial Sequence
  Description of Artificial Sequence: Synthetic primer
caaatgtagtttttacaaccgaagataacatatttggaac

SEQ ID NO: 23744 - DNA, 40 bp, Artificial Sequence
  Description of Artificial Sequence: Synthetic primer
cttctgccagtaacgctcagcacgtcggctcttggtacag

SEQ ID NO: 23745 - DNA, 40 bp, Artificial Sequence
  Description of Artificial Sequence: Synthetic primer
ggtgaccagggccccctcatctggggactgagctttgtag

SEQ ID NO: 23746 - DNA, 40 bp, Artificial Sequence
  Description of Artificial Sequence: Synthetic primer
ttaattaattgaatataataggatacctagcaaatgtttt

SEQ ID NO: 23747 - DNA, 40 bp, Artificial Sequence
  Description of Artificial Sequence: Synthetic primer
aaacagttaatggggacagtcgaagaacttcagaagagaa

SEQ ID NO: 23748 - DNA, 40 bp, Artificial Sequence
  Description of Artificial Sequence: Synthetic primer
agccaggcaattattcctgtggatgttgatgaggaacaag

SEQ ID NO: 23749 - DNA, 40 bp, Artificial Sequence
  Description of Artificial Sequence: Synthetic primer
caaccaagtgaaaatgataaacttcagaaagaactcaatg

SEQ ID NO: 23750 - DNA, 40 bp, Artificial Sequence
  Description of Artificial Sequence: Synthetic primer
aactccttgatgcggtcattgatgttgaaccttcgtctcc

SEQ ID NO: 23751 - DNA, 40 bp, Artificial Sequence
  Description of Artificial Sequence: Synthetic primer
cgggaagccaagcttgtggagttcgatttcttgggagcac

SEQ ID NO: 23752 - DNA, 40 bp, Artificial Sequence
  Description of Artificial Sequence: Synthetic primer
gcctacaagtatcactttatcttgaggaaaaaccttagtc

SEQ ID NO: 23753 - DNA, 40 bp, Artificial Sequence
  Description of Artificial Sequence: Synthetic primer
tctgcatttggttctagcaacaatactggaggcctctttg

SEQ ID NO: 23754 - DNA, 40 bp, Artificial Sequence
  Description of Artificial Sequence: Synthetic primer
tccagcatcaccaggtcggtgaggaacgtgcccaggtagg

SEQ ID NO: 23755 - DNA, 40 bp, Artificial Sequence
  Description of Artificial Sequence: Synthetic primer
aaatgatccagccatcattgcacattaaaagaaaataagc

SEQ ID NO: 23756 - DNA, 40 bp, Artificial Sequence
  Description of Artificial Sequence: Synthetic primer
acagctgcctggaacccacgactcccgagagcccgtctgc

SEQ ID NO: 23757 - DNA, 40 bp, Artificial Sequence
  Description of Artificial Sequence: Synthetic primer
cctgccaatcagaatgctgctcctcaagtggttgttaatc

SEQ ID NO: 23758 - DNA, 40 bp, Artificial Sequence
  Description of Artificial Sequence: Synthetic primer
cattgcaatacaaatgatctgcctggtgaatgctgagctg

SEQ ID NO: 23759 - DNA, 40 bp, Artificial Sequence
  Description of Artificial Sequence: Synthetic primer
cttcattggttcctgtgctgtagtaaatgtgttaggtagc

SEQ ID NO: 23760 - DNA, 40 bp, Artificial Sequence
  Description of Artificial Sequence: Synthetic primer
ttggctactgcagtttcagaagcctggttggcacaagctc

SEQ ID NO: 23761 - DNA, 40 bp, Artificial Sequence
  Description of Artificial Sequence: Synthetic primer
ccagcggctgcaggactgggcacagcatgagatccaaagg

SEQ ID NO: 23762 - DNA, 40 bp, Artificial Sequence
  Description of Artificial Sequence: Synthetic primer
agtaaaacatgatattgaccacttggagaactcagaaaat

SEQ ID NO: 23763 - DNA, 40 bp, Artificial Sequence
  Description of Artificial Sequence: Synthetic primer
tgccaccaagtaggcagaataaaagccaacaccaaactgc

SEQ ID NO: 23764 - DNA, 40 bp, Artificial Sequence
  Description of Artificial Sequence: Synthetic primer
tcaaagaactggatctttatctggcttactttgtccacac

SEQ ID NO: 23765 - DNA, 40 bp, Artificial Sequence
  Description of Artificial Sequence: Synthetic primer
aaaagctagtgatttacagcctatcttgggttaagaatcc

SEQ ID NO: 23766 - DNA, 40 bp, Artificial Sequence
  Description of Artificial Sequence: Synthetic primer
ggaggtgagaggaggtaccgtgctatggtgagtgctactg

SEQ ID NO: 23767 - DNA, 40 bp, Artificial Sequence
  Description of Artificial Sequence: Synthetic primer
taggattcctaaccctgagtatttcatagctagttcattc

SEQ ID NO: 23768 - DNA, 40 bp, Artificial Sequence
  Description of Artificial Sequence: Synthetic primer
caatttagttaaacttgtgaaggcttgtacgtttcagagg

SEQ ID NO: 23769 - DNA, 40 bp, Artificial Sequence
  Description of Artificial Sequence: Synthetic primer
caggtggaccaggagggcctgtgggaccatcttcaccatc

SEQ ID NO: 23770 - DNA, 40 bp, Artificial Sequence
  Description of Artificial Sequence: Synthetic primer
aaacagagagagaaagaaaagaaaagaagccctcaagatg

SEQ ID NO: 23771 - DNA, 40 bp, Artificial Sequence
  Description of Artificial Sequence: Synthetic primer
cagtaatgcttcccttcctttctcctctttcttttgattg

SEQ ID NO: 23772 - DNA, 40 bp, Artificial Sequence
  Description of Artificial Sequence: Synthetic primer
ggtccgggaagttgagatatcgctcagggacaaagcctac

SEQ ID NO: 23773 - DNA, 40 bp, Artificial Sequence
  Description of Artificial Sequence: Synthetic primer
cttgactaatcttcgggcagagagaaggaaacacttagag

SEQ ID NO: 23774 - DNA, 40 bp, Artificial Sequence
  Description of Artificial Sequence: Synthetic primer
tctcccccccggccggcatccgaacagagccagtctccac

SEQ ID NO: 23775 - DNA, 40 bp, Artificial Sequence
  Description of Artificial Sequence: Synthetic primer
tatagtctgaccgataacatcaattgccccaggtaatctc

SEQ ID NO: 23776 - DNA, 40 bp, Artificial Sequence
  Description of Artificial Sequence: Synthetic primer
gggagtctccccttcaagcagctgagcaccagctgtggat

SEQ ID NO: 23777 - DNA, 40 bp, Artificial Sequence
  Description of Artificial Sequence: Synthetic primer
gaataatctaaaggcttgatgtgattaccagacattttag

SEQ ID NO: 23778 - DNA, 40 bp, Artificial Sequence
  Description of Artificial Sequence: Synthetic primer
tgaaattcaaatacatggaggcacatcttcagggcaccag

SEQ ID NO: 23779 - DNA, 40 bp, Artificial Sequence
  Description of Artificial Sequence: Synthetic primer
tcaaggtgtacaggtagatcttgtagtcagtgcctggttg

SEQ ID NO: 23780 - DNA, 40 bp, Artificial Sequence
  Description of Artificial Sequence: Synthetic primer
gcctgccatgccccagcccctcttccccacaaagagtatc

SEQ ID NO: 23781 - DNA, 40 bp, Artificial Sequence
  Description of Artificial Sequence: Synthetic primer
ccagaaggacgttgcctccaaaatctggcagctcactttg

SEQ ID NO: 23782 - DNA, 40 bp, Artificial Sequence
  Description of Artificial Sequence: Synthetic primer
tttaataaacctggggaaaaattatgagaaagctgtaaac

SEQ ID NO: 23783 - DNA, 40 bp, Artificial Sequence
  Description of Artificial Sequence: Synthetic primer
tccagggaaaggtctccccttaaaaccacgtggagctctg

SEQ ID NO: 23784 - DNA, 40 bp, Artificial Sequence
  Description of Artificial Sequence: Synthetic primer
ccgatggtattgcttcttgaatgtcactgtaataggcttc

SEQ ID NO: 23785 - DNA, 40 bp, Artificial Sequence
  Description of Artificial Sequence: Synthetic primer
tctttttcagctcctcccattgagcctctttcgaacttag

SEQ ID NO: 23786 - DNA, 40 bp, Artificial Sequence
  Description of Artificial Sequence: Synthetic primer
tctcgggaaggtctattttcgctcagcttccctctgtctc

SEQ ID NO: 23787 - DNA, 40 bp, Artificial Sequence
  Description of Artificial Sequence: Synthetic primer
aaacttgtgctgcagttgtgtcctccgggccgtggggttg

SEQ ID NO: 23788 - DNA, 40 bp, Artificial Sequence
  Description of Artificial Sequence: Synthetic primer
cttgtcagtgctcacagacagctcaccaccaaaggaaagg

SEQ ID NO: 23789 - DNA, 40 bp, Artificial Sequence
  Description of Artificial Sequence: Synthetic primer
tcaagattggtgattttggcatgagcagggatatctacag

SEQ ID NO: 23790 - DNA, 40 bp, Artificial Sequence
  Description of Artificial Sequence: Synthetic primer
ggtccatattcttggtcagccaggcactcgcattatagtc

SEQ ID NO: 23791 - DNA, 40 bp, Artificial Sequence
  Description of Artificial Sequence: Synthetic primer
gcttccccaaccggatcgtcttccaggagttccgccaacg

SEQ ID NO: 23792 - DNA, 40 bp, Artificial Sequence
  Description of Artificial Sequence: Synthetic primer
atgcaaaacagaaccttccaaatttccttttccaactaag

SEQ ID NO: 23793 - DNA, 40 bp, Artificial Sequence
  Description of Artificial Sequence: Synthetic primer
cagaaatttcaaggataatgattctggccactagagaatg

SEQ ID NO: 23794 - DNA, 40 bp, Artificial Sequence
  Description of Artificial Sequence: Synthetic primer
gcagccatggaagaccttacacggttaaaagagaccatag

SEQ ID NO: 23795 - DNA, 40 bp, Artificial Sequence
  Description of Artificial Sequence: Synthetic primer
ctggggtccttggagggctcggggctctcggtggagtagg

SEQ ID NO: 23796 - DNA, 40 bp, Artificial Sequence
  Description of Artificial Sequence: Synthetic primer
ttttattaaccatttgtacaataaatgtcacttcccatgc

SEQ ID NO: 23797 - DNA, 40 bp, Artificial Sequence
  Description of Artificial Sequence: Synthetic primer
gcaagggacggcaggactgtttcacacttttctgcttctg

SEQ ID NO: 23798 - DNA, 40 bp, Artificial Sequence
  Description of Artificial Sequence: Synthetic primer
cactctttctttagaaatgtgaagtgacccctgaaaaacc

SEQ ID NO: 23799 - DNA, 40 bp, Artificial Sequence
  Description of Artificial Sequence: Synthetic primer
ccggcttcccagagtatggctaccctgccgacaccgtctg

SEQ ID NO: 23800 - DNA, 40 bp, Artificial Sequence
  Description of Artificial Sequence: Synthetic primer
ccagttccaggtacctccccctcccactgccgcccttctc

SEQ ID NO: 23801 - DNA, 40 bp, Artificial Sequence
  Description of Artificial Sequence: Synthetic primer
tcagaaatgctttatgagccacaaattttaatccagaatc

SEQ ID NO: 23802 - DNA, 40 bp, Artificial Sequence
  Description of Artificial Sequence: Synthetic primer
actgcagatcactagagtcaaacaatgtaaatgtctcaac

SEQ ID NO: 23803 - DNA, 40 bp, Artificial Sequence
  Description of Artificial Sequence: Synthetic primer
cttagcaatatgattttataatggctcctcattatgcttg

SEQ ID NO: 23804 - DNA, 40 bp, Artificial Sequence
  Description of Artificial Sequence: Synthetic primer
ggcttaggaattcattaaagtagtctacaaggaaatcatc

SEQ ID NO: 23805 - DNA, 40 bp, Artificial Sequence
  Description of Artificial Sequence: Synthetic primer
agccgaccgagtggcggaaagcaataaaatcaacaaagag

SEQ ID NO: 23806 - DNA, 40 bp, Artificial Sequence
  Description of Artificial Sequence: Synthetic primer
agactattaataatttactttttgtcacttgctaacttgg

SEQ ID NO: 23807 - DNA, 40 bp, Artificial Sequence
  Description of Artificial Sequence: Synthetic primer
aacagaaagctgccttttttccccaaagaaatctgtcacc

SEQ ID NO: 23808 - DNA, 40 bp, Artificial Sequence
  Description of Artificial Sequence: Synthetic primer
ggaagctcttctgagaggtcatacttgtcctttgttcatc

SEQ ID NO: 23809 - DNA, 40 bp, Artificial Sequence
  Description of Artificial Sequence: Synthetic primer
tttcttttttgatccacttaataccttcttcacgactgag

SEQ ID NO: 23810 - DNA, 40 bp, Artificial Sequence
  Description of Artificial Sequence: Synthetic primer
agcttatgtttgaagataaatccttacttttagcttttgc

SEQ ID NO: 23811 - DNA, 40 bp, Artificial Sequence
  Description of Artificial Sequence: Synthetic primer
ggcgccacctcatcggccctggactcagaaaaagatgctg

SEQ ID NO: 23812 - DNA, 40 bp, Artificial Sequence
  Description of Artificial Sequence: Synthetic primer
gcatcagcctgggctgctcgtccatctccaaaggctacgg

SEQ ID NO: 23813 - DNA, 40 bp, Artificial Sequence
  Description of Artificial Sequence: Synthetic primer
aacttggtggctaccaatgcccacctcgaccattactacc

SEQ ID NO: 23814 - DNA, 40 bp, Artificial Sequence
  Description of Artificial Sequence: Synthetic primer
aatcttacttcagaagagcaatataatacagatttcacag

SEQ ID NO: 23815 - DNA, 40 bp, Artificial Sequence
  Description of Artificial Sequence: Synthetic primer
tgcagtgccactccagaggattccggattgccataaatac

SEQ ID NO: 23816 - DNA, 40 bp, Artificial Sequence
  Description of Artificial Sequence: Synthetic primer
aagaattttataagaacgcagaagttagaccaccatttac

SEQ ID NO: 23817 - DNA, 40 bp, Artificial Sequence
  Description of Artificial Sequence: Synthetic primer
atcccttagctgggactcctcaagcacaagccaccatgac

SEQ ID NO: 23818 - DNA, 40 bp, Artificial Sequence
  Description of Artificial Sequence: Synthetic primer
ctatgccaaagatcacttgttgttttactaaagaaagatt

SEQ ID NO: 23819 - DNA, 40 bp, Artificial Sequence
  Description of Artificial Sequence: Synthetic primer
gactcccacactaaggaagagttaatcgaattaaaagagg

SEQ ID NO: 23820 - DNA, 40 bp, Artificial Sequence
  Description of Artificial Sequence: Synthetic primer
ttcaaaccaaatgagtacttatatatggatctctgtagac

SEQ ID NO: 23821 - DNA, 40 bp, Artificial Sequence
  Description of Artificial Sequence: Synthetic primer
aggagtcctccagctgagaacgaggtgtccacccccatgc

SEQ ID NO: 23822 - DNA, 40 bp, Artificial Sequence
  Description of Artificial Sequence: Synthetic primer
gcctcatttagtgcctggggttcaacatcacaaccatagg

SEQ ID NO: 23823 - DNA, 40 bp, Artificial Sequence
  Description of Artificial Sequence: Synthetic primer
gcctgatgtggtcctctaggcatcattctgccctgctttc

SEQ ID NO: 23824 - DNA, 40 bp, Artificial Sequence
  Description of Artificial Sequence: Synthetic primer
cagctggagaagagcgggggccatgaccggctgaggaaac

SEQ ID NO: 23825 - DNA, 40 bp, Artificial Sequence
  Description of Artificial Sequence: Synthetic primer
ggccaggccatcgctccagctgctgctgaaattggtgatg

SEQ ID NO: 23826 - DNA, 40 bp, Artificial Sequence
  Description of Artificial Sequence: Synthetic primer
gccgctaatggaactgaagacagctgggcctaacaagtgc

SEQ ID NO: 23827 - DNA, 40 bp, Artificial Sequence
  Description of Artificial Sequence: Synthetic primer
tcagaattccgagaaggagtgcggaagattgcccgagagc

SEQ ID NO: 23828 - DNA, 40 bp, Artificial Sequence
  Description of Artificial Sequence: Synthetic primer
cgacctgtgcacagccccctcggcctccgcctccgtgctg

SEQ ID NO: 23829 - DNA, 40 bp, Artificial Sequence
  Description of Artificial Sequence: Synthetic primer
tccacccttctgccagcaccgcagggacctctggggacag

SEQ ID NO: 23830 - DNA, 40 bp, Artificial Sequence
  Description of Artificial Sequence: Synthetic primer
cttactacagaaggctgaaaagaaaatcggggtctggaag

SEQ ID NO: 23831 - DNA, 40 bp, Artificial Sequence
  Description of Artificial Sequence: Synthetic primer
ggcaaggctgcccccgatgagcctggaagtgcagctttgg

SEQ ID NO: 23832 - DNA, 40 bp, Artificial Sequence
  Description of Artificial Sequence: Synthetic primer
agcaggcttctaaaatggcatcatgaataaaaatgtactg

SEQ ID NO: 23833 - DNA, 40 bp, Artificial Sequence
  Description of Artificial Sequence: Synthetic primer
aagttcgggaacttttggcagaagccaaagcaaaagatag

SEQ ID NO: 23834 - DNA, 40 bp, Artificial Sequence
  Description of Artificial Sequence: Synthetic primer
ccggtaagatgggtgtcctatttgacacttggaaaggaac

SEQ ID NO: 23835 - DNA, 40 bp, Artificial Sequence
  Description of Artificial Sequence: Synthetic primer
ctcccaattcagctttgtgtcccaggacgtcaaacacatc

SEQ ID NO: 23836 - DNA, 40 bp, Artificial Sequence
  Description of Artificial Sequence: Synthetic primer
ttttgtaaatcttgacttgaacgaccaagtaactctcctc

SEQ ID NO: 23837 - DNA, 40 bp, Artificial Sequence
  Description of Artificial Sequence: Synthetic primer
cgagataacctcgtgcttgggcctgtaccacaacaataac

SEQ ID NO: 23838 - DNA, 40 bp, Artificial Sequence
  Description of Artificial Sequence: Synthetic primer
cgctcatgtgtcggaactagatctttctgacaacaaactc

SEQ ID NO: 23839 - DNA, 40 bp, Artificial Sequence
  Description of Artificial Sequence: Synthetic primer
tgtgcagtaggcgtggctgctctgcatgtttttaataagg

SEQ ID NO: 23840 - DNA, 40 bp, Artificial Sequence
  Description of Artificial Sequence: Synthetic primer
actgatcacacttgtattccctctcttcagtatgtgacag

SEQ ID NO: 23841 - DNA, 40 bp, Artificial Sequence
  Description of Artificial Sequence: Synthetic primer
acccattaatactctggttgacctaatcttattctcagac

SEQ ID NO: 23842 - DNA, 40 bp, Artificial Sequence
  Description of Artificial Sequence: Synthetic primer
agaggctgccagcactcccagggaccctattgacgttgac

SEQ ID NO: 23843 - DNA, 40 bp, Artificial Sequence
  Description of Artificial Sequence: Synthetic primer
gagcacactttagttcatagctcatttcattaagtttctc

SEQ ID NO: 23844 - DNA, 40 bp, Artificial Sequence
  Description of Artificial Sequence: Synthetic primer
aaaatgggagacaatccgaagccaggtcttgctgccactc

SEQ ID NO: 23845 - DNA, 40 bp, Artificial Sequence
  Description of Artificial Sequence: Synthetic primer
ggcaggacagccgttgacctggtgtttccggcgaggcttg

SEQ ID NO: 23846 - DNA, 40 bp, Artificial Sequence
  Description of Artificial Sequence: Synthetic primer
tgttgtctgctatgttgttcagtgctggcttttctgattc

SEQ ID NO: 23847 - DNA, 40 bp, Artificial Sequence
  Description of Artificial Sequence: Synthetic primer
cagctctgccattttccacccctctgcatcgcttcctctc

SEQ ID NO: 23848 - DNA, 40 bp, Artificial Sequence
  Description of Artificial Sequence: Synthetic primer
ttcgcagaaaggtggggcagagctcatctgacgtggcatc

SEQ ID NO: 23849 - DNA, 40 bp, Artificial Sequence
  Description of Artificial Sequence: Synthetic primer
tggaataagtcataactgaggaagaacaaaatgaatgtcc

SEQ ID NO: 23850 - DNA, 40 bp, Artificial Sequence
  Description of Artificial Sequence: Synthetic primer
agatgacagactggaagattctaaaatgcactgtgtaagg

SEQ ID NO: 23851 - DNA, 40 bp, Artificial Sequence
  Description of Artificial Sequence: Synthetic primer
gggggaaaaagtaaattacaaacaaacaaacaaagcagaa

SEQ ID NO: 23852 - DNA, 40 bp, Artificial Sequence
  Description of Artificial Sequence: Synthetic primer
tgtatactttaatgaatgcagtacctcctggacctaacag

SEQ ID NO: 23853 - DNA, 40 bp, Artificial Sequence
  Description of Artificial Sequence: Synthetic primer
cttctttatttcaaaggaaaaataaaagaccctcccaacc

SEQ ID NO: 23854 - DNA, 40 bp, Artificial Sequence
  Description of Artificial Sequence: Synthetic primer
cggaggtgacagtagctccttcctctccaacatgtgatgc

SEQ ID NO: 23855 - DNA, 40 bp, Artificial Sequence
  Description of Artificial Sequence: Synthetic primer
taaggcgaagtcatgatgtattctcccatctgtctcactc

SEQ ID NO: 23856 - DNA, 40 bp, Artificial Sequence
  Description of Artificial Sequence: Synthetic primer
ggctgctccggggcaggctgtggaacttattgggctcctc

SEQ ID NO: 23857 - DNA, 40 bp, Artificial Sequence; identical to SEQ ID NO: 10277
  Description of Artificial Sequence: Synthetic primer

SEQ ID NO: 23858 - DNA, 40 bp, Artificial Sequence
  Description of Artificial Sequence: Synthetic primer
tttccacttggccctgcggctgcggtcttcgggagaggag

SEQ ID NO: 23859 - DNA, 40 bp, Artificial Sequence
  Description of Artificial Sequence: Synthetic primer
aatgaagatctgaagtcccagaggcttgttttccatgtag

SEQ ID NO: 23860 - DNA, 40 bp, Artificial Sequence
  Description of Artificial Sequence: Synthetic primer
cagcgccgcagctctgtgaagaagattgagaagatgaagg

SEQ ID NO: 23861 - DNA, 40 bp, Artificial Sequence
  Description of Artificial Sequence: Synthetic primer
gggagcttgcaaaaatgctcttgaagtagatcttggttac

SEQ ID NO: 23862 - DNA, 40 bp, Artificial Sequence
  Description of Artificial Sequence: Synthetic primer
ctccctctaggctgggtggttcttagttcagcagaaggtc

SEQ ID NO: 23863 - DNA, 40 bp, Artificial Sequence
  Description of Artificial Sequence: Synthetic primer
ttgtaaaacagtaacatcaaattggctagagagataaatg

SEQ ID NO: 23864 - DNA, 40 bp, Artificial Sequence
  Description of Artificial Sequence: Synthetic primer
gctgggactaataccatgtagaaggtgggggaagataagc

SEQ ID NO: 23865 - DNA, 40 bp, Artificial Sequence
  Description of Artificial Sequence: Synthetic primer
tatttttaaaaatccttttagttgggtgaaatccaagaag

SEQ ID NO: 23866 - DNA, 40 bp, Artificial Sequence
  Description of Artificial Sequence: Synthetic primer
gatatcaagcccccccaaattatctgttttaatattgaac

SEQ ID NO: 23867 - DNA, 40 bp, Artificial Sequence
  Description of Artificial Sequence: Synthetic primer
gccgagcgatcattcgtcacagtcgggcggagtttcacag

SEQ ID NO: 23868 - DNA, 40 bp, Artificial Sequence
  Description of Artificial Sequence: Synthetic primer
ggccgatggcggccacctccgagtccccgacactctgtgc

SEQ ID NO: 23869 - DNA, 40 bp, Artificial Sequence
  Description of Artificial Sequence: Synthetic primer
tcagtttctctaccagttgactttgctggttaatttcttc

SEQ ID NO: 23870 - DNA, 40 bp, Artificial Sequence
  Description of Artificial Sequence: Synthetic primer
tttgttcaggatacctttgccatctgtgtcggctaaatcc

SEQ ID NO: 23871 - DNA, 40 bp, Artificial Sequence
  Description of Artificial Sequence: Synthetic primer
aaaaaaaggaatatttgtacccaacagctagaaggattgc

SEQ ID NO: 23872 - DNA, 40 bp, Artificial Sequence
  Description of Artificial Sequence: Synthetic primer
cactggccaagaaaattgcctttaaaactcgaaaataagg

SEQ ID NO: 23873 - DNA, 40 bp, Artificial Sequence
  Description of Artificial Sequence: Synthetic primer
cacagtatcagttaaggagcttgatttgtttttggcatac

SEQ ID NO: 23874 - DNA, 40 bp, Artificial Sequence
  Description of Artificial Sequence: Synthetic primer
tcttccctcgtgggctgttcctctagctcctttttctttg

SEQ ID NO: 23875 - DNA, 40 bp, Artificial Sequence
  Description of Artificial Sequence: Synthetic primer
tcagaacagctccgacaagttgaagaactgaagaagaaag

SEQ ID NO: 23876 - DNA, 40 bp, Artificial Sequence
  Description of Artificial Sequence: Synthetic primer
aggggtcccgggaacgcccgcatctcctcctgctcagacg

SEQ ID NO: 23877 - DNA, 40 bp, Artificial Sequence
  Description of Artificial Sequence: Synthetic primer
tcagactgaggaaagccaaggagaaaaatggaccaatcag

SEQ ID NO: 23878 - DNA, 40 bp, Artificial Sequence
  Description of Artificial Sequence: Synthetic primer
ggggcttggtactcagagcactcgtgtgaagagcagaatc

SEQ ID NO: 23879 - DNA, 40 bp, Artificial Sequence
  Description of Artificial Sequence: Synthetic primer
ggtaagtgttcccagtgtacttgtcaaagcaagtctcttc

SEQ ID NO: 23880 - DNA, 40 bp, Artificial Sequence
  Description of Artificial Sequence: Synthetic primer
tctctggcacagttcttgagcagtagatgagtttggtcac

SEQ ID NO: 23881 - DNA, 40 bp, Artificial Sequence
  Description of Artificial Sequence: Synthetic primer
cggtaacgagaaggagttcatgaagggcaaccagctcatc

SEQ ID NO: 23882 - DNA, 40 bp, Artificial Sequence
  Description of Artificial Sequence: Synthetic primer
tgtagcggccattgttgctgctgtagtggccttgatctac

SEQ ID NO: 23883 - DNA, 40 bp, Artificial Sequence
  Description of Artificial Sequence: Synthetic primer
actggaatctctttccaaacatttttccattttcccacag

SEQ ID NO: 23884 - DNA, 40 bp, Artificial Sequence
  Description of Artificial Sequence: Synthetic primer
ggccggggctggaggagactggcggagctggcggggagtc

SEQ ID NO: 23885 - DNA, 40 bp, Artificial Sequence
  Description of Artificial Sequence: Synthetic primer
gacaagtcaaggtgacggaaatgtttcctagacaaactcg

SEQ ID NO: 23886 - DNA, 40 bp, Artificial Sequence
  Description of Artificial Sequence: Synthetic primer
ggctctgtgtgtagacgtaggggacgccaaacatgatgac

SEQ ID NO: 23887 - DNA, 40 bp, Artificial Sequence
  Description of Artificial Sequence: Synthetic primer
ctgcctcagccctcaggctcctaactgctcaagccagaag

SEQ ID NO: 23888 - DNA, 40 bp, Artificial Sequence
  Description of Artificial Sequence: Synthetic primer
caggctttgtaccagccgccatactctccaaaagatgtcc

SEQ ID NO: 23889 - DNA, 40 bp, Artificial Sequence
  Description of Artificial Sequence: Synthetic primer
actattttaataacatgatttgttctttaaattttatgtg

SEQ ID NO: 23890 - DNA, 40 bp, Artificial Sequence
  Description of Artificial Sequence: Synthetic primer
ggctgtggaccccctgcgaaggacagtggagaagtacagc

SEQ ID NO: 23891 - DNA, 40 bp, Artificial Sequence
  Description of Artificial Sequence: Synthetic primer
atcagttaattgggcaagccctgatgtcagtgtgtgtaac

SEQ ID NO: 23892 - DNA, 40 bp, Artificial Sequence
  Description of Artificial Sequence: Synthetic primer
gctggtagaagcaggtggggttcctggatttgtaccatag

SEQ ID NO: 23893 - DNA, 40 bp, Artificial Sequence
  Description of Artificial Sequence: Synthetic primer
tggtggttgaaccagcaaattagcaggctgattagaaacc

SEQ ID NO: 23894 - DNA, 40 bp, Artificial Sequence
  Description of Artificial Sequence: Synthetic primer
atatttacacaacgtgaaattaactgtaccatagataccc

SEQ ID NO: 23895 - DNA, 40 bp, Artificial Sequence
  Description of Artificial Sequence: Synthetic primer
cttgcatcttctccaaaataagtgttgtctaaaaacgaag

SEQ ID NO: 23896 - DNA, 40 bp, Artificial Sequence
  Description of Artificial Sequence: Synthetic primer
ttgctgagtacatccaagatttgaagaactgaaataaatc

SEQ ID NO: 23897 - DNA, 40 bp, Artificial Sequence
  Description of Artificial Sequence: Synthetic primer
tcaccgatcttggccactccatcgtagtaggcttttcctg

SEQ ID NO: 23898 - DNA, 40 bp, Artificial Sequence
  Description of Artificial Sequence: Synthetic primer
gctcttacagaaatgtgtcttgttgcatttggtaatttag

SEQ ID NO: 23899 - DNA, 40 bp, Artificial Sequence
  Description of Artificial Sequence: Synthetic primer
cctatcatttccgttttgcctgtgactgtaaagagtagcc

SEQ ID NO: 23900 - DNA, 40 bp, Artificial Sequence
  Description of Artificial Sequence: Synthetic primer
gagcaccaaaaagcaaaaagtgaaattcagaatgataagc

SEQ ID NO: 23901 - DNA, 40 bp, Artificial Sequence
  Description of Artificial Sequence: Synthetic primer
ctattttggatgcaaaacggagcatgaacattgggatatt

SEQ ID NO: 23902 - DNA, 40 bp, Artificial Sequence
  Description of Artificial Sequence: Synthetic primer
atgagtttaccatagaattgttggaaatactgaagacagg

SEQ ID NO: 23903 - DNA, 40 bp, Artificial Sequence
  Description of Artificial Sequence: Synthetic primer
ctttggttattaccctggaaaattgagggttgatggtagg

SEQ ID NO: 23904 - DNA, 40 bp, Artificial Sequence
  Description of Artificial Sequence: Synthetic primer
cttcagttaagtgttactgaagttgggacagaaaagttgg

SEQ ID NO: 23905 - DNA, 40 bp, Artificial Sequence
  Description of Artificial Sequence: Synthetic primer
atcccttggccttaattgaggagctagagcaagaagaagg

SEQ ID NO: 23906 - DNA, 40 bp, Artificial Sequence
  Description of Artificial Sequence: Synthetic primer
gaaatggaatggacaaaaggaaacgtgaatttgatatgac

SEQ ID NO: 23907 - DNA, 40 bp, Artificial Sequence
  Description of Artificial Sequence: Synthetic primer
ttttcacattttgcttagagtaattcagtctccttctctc

SEQ ID NO: 23908 - DNA, 40 bp, Artificial Sequence
  Description of Artificial Sequence: Synthetic primer
gctccttccattccatttttgtgtttgttttgttcttttc

SEQ ID NO: 23909 - DNA, 40 bp, Artificial Sequence
  Description of Artificial Sequence: Synthetic primer
cgttggaatcaacagcagcattgatcgttttggcattttg

SEQ ID NO: 23910 - DNA, 40 bp, Artificial Sequence
  Description of Artificial Sequence: Synthetic primer
gctccagcctaaggtggaactggtgctcatagtcacgaac

SEQ ID NO: 23911 - DNA, 40 bp, Artificial Sequence
  Description of Artificial Sequence: Synthetic primer
cactttcctacaggctgagatccagaggcttgaaatgctg

SEQ ID NO: 23912 - DNA, 40 bp, Artificial Sequence
  Description of Artificial Sequence: Synthetic primer
aaggaaaacaagaggccccagagggaaaagaagcccaaag

SEQ ID NO: 23913 - DNA, 40 bp, Artificial Sequence
  Description of Artificial Sequence: Synthetic primer
ccacgtggggactagaatgactattagcctctccttttgc

SEQ ID NO: 23914 - DNA, 40 bp, Artificial Sequence
  Description of Artificial Sequence: Synthetic primer
ctggctgcagcccaggagggtgagggctgtggtcatgctg

SEQ ID NO: 23915 - DNA, 40 bp, Artificial Sequence
  Description of Artificial Sequence: Synthetic primer
tccacattcaaggggtcaacttccagttccaggtcaatgc

SEQ ID NO: 23916 - DNA, 40 bp, Artificial Sequence
  Description of Artificial Sequence: Synthetic primer
taattactaattttatttcagactgcgtatttccagtgtc

SEQ ID NO: 23917 - DNA, 40 bp, Artificial Sequence
  Description of Artificial Sequence: Synthetic primer
catggagtacattcataagatagaggctgaccttgaacac

SEQ ID NO: 23918 - DNA, 40 bp, Artificial Sequence
  Description of Artificial Sequence: Synthetic primer
gtggtttgattaattggattggctgtgtggatgtggaacg

SEQ ID NO: 23919 - DNA, 40 bp, Artificial Sequence
  Description of Artificial Sequence: Synthetic primer
ctttgagtatatgcggcacggggacctcaaccgcttcctc

SEQ ID NO: 23920 - DNA, 40 bp, Artificial Sequence
  Description of Artificial Sequence: Synthetic primer
tcaagcagagcacgtgcgaggcggtgatgatcctgcgttc

SEQ ID NO: 23921 - DNA, 40 bp, Artificial Sequence
  Description of Artificial Sequence: Synthetic primer
ggttttgctctcagccctgctgtgtgccatgctagacttc

SEQ ID NO: 23922 - DNA, 40 bp, Artificial Sequence
  Description of Artificial Sequence: Synthetic primer
cggggctccatggctgggtgcgggttgttaataaaacttc

SEQ ID NO: 23923 - DNA, 40 bp, Artificial Sequence
  Description of Artificial Sequence: Synthetic primer
gcctcacttcgtgaacaaagttcaaaacacattttcagtc

SEQ ID NO: 23924 - DNA, 40 bp, Artificial Sequence
  Description of Artificial Sequence: Synthetic primer
ttgtaagattccttttgagttaaatctcatacccactcaa

SEQ ID NO: 23925 - DNA, 40 bp, Artificial Sequence
  Description of Artificial Sequence: Synthetic primer
caacaaatgccaatgtcaagaaggttggcatggaagacac

SEQ ID NO: 23926 - DNA, 40 bp, Artificial Sequence
  Description of Artificial Sequence: Synthetic primer
gcgctcccatggctcttgcaacatctccccttcgtttttg

SEQ ID NO: 23927 - DNA, 40 bp, Artificial Sequence
  Description of Artificial Sequence: Synthetic primer
gctcttcagggaatgtgctagaacaggtagaaggcacagg

SEQ ID NO: 23928 - DNA, 40 bp, Artificial Sequence
  Description of Artificial Sequence: Synthetic primer
aataaagcaaagtgatatatatttgtttatgaaatgttac

SEQ ID NO: 23929 - DNA, 40 bp, Artificial Sequence
  Description of Artificial Sequence: Synthetic primer
cgacctaaacttcacagagcaacagtccccatgagagagc

SEQ ID NO: 23930 - DNA, 40 bp, Artificial Sequence
  Description of Artificial Sequence: Synthetic primer
ctgtcccagaagctgtatgccaccatggagaagcacaagg

SEQ ID NO: 23931 - DNA, 40 bp, Artificial Sequence
  Description of Artificial Sequence: Synthetic primer
ggtgaactcagatgttatggttttgtaaatgtctgcaatc

SEQ ID NO: 23932 - DNA, 40 bp, Artificial Sequence
  Description of Artificial Sequence: Synthetic primer
gtaggttaagtttacctgctttcaggtgtggtgatgtatg

SEQ ID NO: 23933 - DNA, 40 bp, Artificial Sequence
  Description of Artificial Sequence: Synthetic primer
ggccccgttggccctgctggcaagagtggtgatcgtggtg

SEQ ID NO: 23934 - DNA, 40 bp, Artificial Sequence
  Description of Artificial Sequence: Synthetic primer
ctgttactgaaaaagtttgttctgaactcgacaataatag

SEQ ID NO: 23935 - DNA, 40 bp, Artificial Sequence
  Description of Artificial Sequence: Synthetic primer
ccctccttcactcctgcctcctcagctttgcttcatgttc

SEQ ID NO: 23936 - DNA, 40 bp, Artificial Sequence
  Description of Artificial Sequence: Synthetic primer
atcatcaggaacaagttcaaacacttcttcttctgacatc

SEQ ID NO: 23937 - DNA, 40 bp, Artificial Sequence
  Description of Artificial Sequence: Synthetic primer
ggggcctcgtgtgtaagtgtgaataaatgtagttgtcttg

SEQ ID NO: 23938 - DNA, 40 bp, Artificial Sequence
  Description of Artificial Sequence: Synthetic primer
cttcagaacagtcaacatcaagtaatcctccaataactac

SEQ ID NO: 23939 - DNA, 40 bp, Artificial Sequence
  Description of Artificial Sequence: Synthetic primer
accagctggccacctgctggcaggctgaacactgcggaga

SEQ ID NO: 23940 - DNA, 40 bp, Artificial Sequence
  Description of Artificial Sequence: Synthetic primer
ctccccggcgacgtgcaggatgctctcacctgcctcgaac

SEQ ID NO: 23941 - DNA, 40 bp, Artificial Sequence
  Description of Artificial Sequence: Synthetic primer
atttgaaaccagaaggggactttttagttgtatgtgtaac

SEQ ID NO: 23942 - DNA, 40 bp, Artificial Sequence
  Description of Artificial Sequence: Synthetic primer
tacccactttagaccatttcttctctttggtgaccatttc

SEQ ID NO: 23943 - DNA, 40 bp, Artificial Sequence
  Description of Artificial Sequence: Synthetic primer
gcagcaggcgcagcctctcctccagcttctggctcttctc

SEQ ID NO: 23944 - DNA, 40 bp, Artificial Sequence
  Description of Artificial Sequence: Synthetic primer
tagataatgcttaatattcacttccccgtggccttccatc

SEQ ID NO: 23945 - DNA, 40 bp, Artificial Sequence
  Description of Artificial Sequence: Synthetic primer
cgagatccagacttggatttgtttgtttttgacatctctg

SEQ ID NO: 23946 - DNA, 40 bp, Artificial Sequence
  Description of Artificial Sequence: Synthetic primer
agccagtgatggctccttctccctgcccctgaagccagtc

SEQ ID NO: 23947 - DNA, 40 bp, Artificial Sequence
  Description of Artificial Sequence: Synthetic primer
ataggcttgtggccacttgcccagcacaactgtgttttgt

SEQ ID NO: 23948 - DNA, 40 bp, Artificial Sequence
  Description of Artificial Sequence: Synthetic primer
cgcggccgtagtaggggaagatcatctgctggccgtgtgc

SEQ ID NO: 23949 - DNA, 40 bp, Artificial Sequence
  Description of Artificial Sequence: Synthetic primer
caacgtcaagtactgcggctactgcaaataccacttcagc

SEQ ID NO: 23950 - DNA, 40 bp, Artificial Sequence
  Description of Artificial Sequence: Synthetic primer
gctgggcgatccgggcctccaggcggcgcttctcgtcctg

SEQ ID NO: 23951 - DNA, 40 bp, Artificial Sequence
  Description of Artificial Sequence: Synthetic primer
gtggccgctcctccctgctcctcatgggaagatgtctcag

SEQ ID NO: 23952 - DNA, 40 bp, Artificial Sequence
  Description of Artificial Sequence: Synthetic primer
aacttatatttaagttgcaagcacatgctgtataagctac

SEQ ID NO: 23953 - DNA, 40 bp, Artificial Sequence
  Description of Artificial Sequence: Synthetic primer
catcagccaggaaagaaaaagattttgtctttataaggac

SEQ ID NO: 23954 - DNA, 40 bp, Artificial Sequence
  Description of Artificial Sequence: Synthetic primer
aacattttatactgtttgtatgtataaaataaaggtgctg

SEQ ID NO: 23955 - DNA, 40 bp, Artificial Sequence
  Description of Artificial Sequence: Synthetic primer
gagtcagaactccagtgcagtaaagaaagcttaggaaaag

SEQ ID NO: 23956 - DNA, 40 bp, Artificial Sequence
  Description of Artificial Sequence: Synthetic primer
ccaaaaaaagtttggagcgatttatcactttgatttggag

SEQ ID NO: 23957 - DNA, 40 bp, Artificial Sequence
  Description of Artificial Sequence: Synthetic primer
actttctgcactatgcagagaagccactactagtattttt

SEQ ID NO: 23958 - DNA, 40 bp, Artificial Sequence
  Description of Artificial Sequence: Synthetic primer
catttcttcatgttaaaagaagtcatctcaaactcttagt

SEQ ID NO: 23959 - DNA, 40 bp, Artificial Sequence
  Description of Artificial Sequence: Synthetic primer
attttttgcccagagagtccagctaacacactttataacc

SEQ ID NO: 23960 - DNA, 40 bp, Artificial Sequence
  Description of Artificial Sequence: Synthetic primer
acttgggggatctgaacgagtcggacttcctcaacaatgc

SEQ ID NO: 23961 - DNA, 40 bp, Artificial Sequence
  Description of Artificial Sequence: Synthetic primer
cgcccagcgcgcggcgctttttccagaagcctcccgaacc

SEQ ID NO: 23962 - DNA, 40 bp, Artificial Sequence
  Description of Artificial Sequence: Synthetic primer
cacctcaaataccaccccaacccactccctgtagtgaatc

SEQ ID NO: 23963 - DNA, 40 bp, Artificial Sequence
  Description of Artificial Sequence: Synthetic primer
cttgttccccaagatgttgtacctcctctttcatcaatac

SEQ ID NO: 23964 - DNA, 40 bp, Artificial Sequence
  Description of Artificial Sequence: Synthetic primer
taaaaaagaagaaagacttggatgttcataacacataaac

SEQ ID NO: 23965 - DNA, 40 bp, Artificial Sequence
  Description of Artificial Sequence: Synthetic primer
gatataaatcacttagaaactcagccggtctctagcaaag

SEQ ID NO: 23966 - DNA, 40 bp, Artificial Sequence
  Description of Artificial Sequence: Synthetic primer
tctggacagctcctacatatttcttcagttggactttgag

SEQ ID NO: 23967 - DNA, 40 bp, Artificial Sequence
  Description of Artificial Sequence: Synthetic primer
agggctgagcattaaagtggcgtttttggtattggttttc

SEQ ID NO: 23968 - DNA, 40 bp, Artificial Sequence
  Description of Artificial Sequence: Synthetic primer
acagggtggcagcagagagccacattactttggcagcaac

SEQ ID NO: 23969 - DNA, 40 bp, Artificial Sequence
  Description of Artificial Sequence: Synthetic primer
gccacagtttacatagacatttcagattcaacacgtactc

SEQ ID NO: 23970 - DNA, 40 bp, Artificial Sequence
  Description of Artificial Sequence: Synthetic primer
gagtctctatatcaggaaggacttgggtgtcttgcattgg

SEQ ID NO: 23971 - DNA, 40 bp, Artificial Sequence
  Description of Artificial Sequence: Synthetic primer
caggacaggcatgtccaggggctcctcccagcctctaccc

SEQ ID NO: 23972 - DNA, 40 bp, Artificial Sequence
  Description of Artificial Sequence: Synthetic primer
gggccgtagttagaaatcaccagtgttggaaacagcagac

SEQ ID NO: 23973 - DNA, 40 bp, Artificial Sequence
  Description of Artificial Sequence: Synthetic primer
cagtgagtgcaaccgcaccttccccagccacacggctctc

SEQ ID NO: 23974 - DNA, 40 bp, Artificial Sequence
  Description of Artificial Sequence: Synthetic primer
cagtccctggcagccttcctgatactcagttacacacttc

SEQ ID NO: 23975 - DNA, 40 bp, Artificial Sequence
  Description of Artificial Sequence: Synthetic primer
agcatcagtgagcgcccggagccgtggccgctgggggttg

SEQ ID NO: 23976 - DNA, 40 bp, Artificial Sequence
  Description of Artificial Sequence: Synthetic primer
tgtttacaagactctattagtaatgacacagacaccaatg

SEQ ID NO: 23977 - DNA, 40 bp, Artificial Sequence
  Description of Artificial Sequence: Synthetic primer
gggggaagggaagcttgtggggccatggagaatggagaag

SEQ ID NO: 23978 - DNA, 40 bp, Artificial Sequence
  Description of Artificial Sequence: Synthetic primer
aaccaaagcatttaactacttccttttgtttctttttctc

SEQ ID NO: 23979 - DNA, 40 bp, Artificial Sequence
  Description of Artificial Sequence: Synthetic primer
ccttggaatgtcagtccatctacatttttaatcttgtttc

SEQ ID NO: 23980 - DNA, 40 bp, Artificial Sequence
  Description of Artificial Sequence: Synthetic primer
cctcctgttctctggtcaatatgtgtgtttactttgcttg

SEQ ID NO: 23981 - DNA, 40 bp, Artificial Sequence
  Description of Artificial Sequence: Synthetic primer
gtatgtttggtaaacactattataatgagaggagggtaac

SEQ ID NO: 23982 - DNA, 40 bp, Artificial Sequence
  Description of Artificial Sequence: Synthetic primer
tggacagtaaatatggttcttgccaaaactccttcttttg

SEQ ID NO: 23983 - DNA, 40 bp, Artificial Sequence
  Description of Artificial Sequence: Synthetic primer
aaaaaaattagtccccttctaataagagtttacatacagc

SEQ ID NO: 23984 - DNA, 40 bp, Artificial Sequence
  Description of Artificial Sequence: Synthetic primer
gctcctccaagaagacaaagtctagttcagaggagagtag

SEQ ID NO: 23985 - DNA, 40 bp, Artificial Sequence
  Description of Artificial Sequence: Synthetic primer
gtggactagtagaaagttcatattctacctctaaaaacag

SEQ ID NO: 23986 - DNA, 40 bp, Artificial Sequence
  Description of Artificial Sequence: Synthetic primer
gccagcccacagccgggctcgggcttcggccacggcatag

SEQ ID NO: 23987 - DNA, 40 bp, Artificial Sequence
  Description of Artificial Sequence: Synthetic primer
cagcccagggcgccctgcctaagacttcttcggccgtctg

SEQ ID NO: 23988 - DNA, 40 bp, Artificial Sequence
  Description of Artificial Sequence: Synthetic primer
ctcgcattcggaaactgacggaatgtaggtttcagagagc

SEQ ID NO: 23989 - DNA, 40 bp, Artificial Sequence
  Description of Artificial Sequence: Synthetic primer
gcagccccccgggtggcgtggagtgtcatcttggtgatgc

SEQ ID NO: 23990 - DNA, 40 bp, Artificial Sequence
  Description of Artificial Sequence: Synthetic primer
tttttgttcgtttttaagtttacttctctttaatcggtct

SEQ ID NO: 23991 - DNA, 40 bp, Artificial Sequence
  Description of Artificial Sequence: Synthetic primer
tgttttctggaaacaactactataactctaaataatccac

SEQ ID NO: 23992 - DNA, 40 bp, Artificial Sequence
  Description of Artificial Sequence: Synthetic primer
agcagaatgtacttgatattatttcagggtcccattgctg

SEQ ID NO: 23993 - DNA, 40 bp, Artificial Sequence
  Description of Artificial Sequence: Synthetic primer
gcagcgtccacttcaacgaccccaagtacccgcagcaatg

SEQ ID NO: 23994 - DNA, 40 bp, Artificial Sequence
  Description of Artificial Sequence: Synthetic primer
actccttctgggaggactgctccacgctagctgtatcctg

SEQ ID NO: 23995 - DNA, 40 bp, Artificial Sequence
  Description of Artificial Sequence: Synthetic primer
acgggagcccacgcgggcgggcgcctgaaacaaagggaag

SEQ ID NO: 23996 - DNA, 40 bp, Artificial Sequence
  Description of Artificial Sequence: Synthetic primer
cgccgggcaggcagaagcagcaggtaccccctccacatcc

SEQ ID NO: 23997 - DNA, 40 bp, Artificial Sequence
  Description of Artificial Sequence: Synthetic primer
ctttaaaactttgggcttcttttccctctggggcctcttg

SEQ ID NO: 23998 - DNA, 40 bp, Artificial Sequence
  Description of Artificial Sequence: Synthetic primer
ccacctcccagtgcggaggctgctgagccagaggccagac

SEQ ID NO: 23999 - DNA, 40 bp, Artificial Sequence
  Description of Artificial Sequence: Synthetic primer
tgccaagagtgctgccctgcaggtgacaaagcagatcacg

SEQ ID NO: 24000 - DNA, 40 bp, Artificial Sequence
  Description of Artificial Sequence: Synthetic primer
aggcttggagctgggggccgtgcgctgccctgggaatgtg

SEQ ID NO: 24001 - DNA, 40 bp, Artificial Sequence
  Description of Artificial Sequence: Synthetic primer
gccaagagggagattcgcttcctagagctacagaaggttg

SEQ ID NO: 24002 - DNA, 40 bp, Artificial Sequence
  Description of Artificial Sequence: Synthetic primer
agaaatctgtacaactttgccacaatcaatatacatgaac

SEQ ID NO: 24003 - DNA, 40 bp, Artificial Sequence
  Description of Artificial Sequence: Synthetic primer
gggcctgggcaaggccggtgctgtgggggcccaggggatg

SEQ ID NO: 24004 - DNA, 40 bp, Artificial Sequence
  Description of Artificial Sequence: Synthetic primer
aataaacgtttatgaagagctgcagtcatgtcatggagcc

SEQ ID NO: 24005 - DNA, 40 bp, Artificial Sequence
  Description of Artificial Sequence: Synthetic primer
aaatgattaatgcactgatgggtcctgaattcaccttgag

SEQ ID NO: 24006 - DNA, 40 bp, Artificial Sequence
  Description of Artificial Sequence: Synthetic primer
gcttgaggtcattgacattatgagattttaggcttgatcc

SEQ ID NO: 24007 - DNA, 40 bp, Artificial Sequence
  Description of Artificial Sequence: Synthetic primer
gctcgctttcagccaaggtcagtcccatactacgtttctg

SEQ ID NO: 24008 - DNA, 40 bp, Artificial Sequence
  Description of Artificial Sequence: Synthetic primer
gatggatacccaacaaaatctcttaaaggaattcaaacag

SEQ ID NO: 24009 - DNA, 40 bp, Artificial Sequence
  Description of Artificial Sequence: Synthetic primer
agaatgagaggctccagaccatggtacagaacaccaaagc

SEQ ID NO: 24010 - DNA, 40 bp, Artificial Sequence
  Description of Artificial Sequence: Synthetic primer
atgggctttgttttgttgagctcttcttgatcgatgtact

SEQ ID NO: 24011 - DNA, 40 bp, Artificial Sequence
  Description of Artificial Sequence: Synthetic primer
cctgaaacactgcttctcggccagcccgtcctcctctacc

SEQ ID NO: 24012 - DNA, 40 bp, Artificial Sequence
  Description of Artificial Sequence: Synthetic primer
tctaactcagactgactgctattgcttaaagttttattgg

SEQ ID NO: 24013 - DNA, 40 bp, Artificial Sequence
  Description of Artificial Sequence: Synthetic primer
tttggaatagatggacagtttgtttcctgtctgatagcac

SEQ ID NO: 24014 - DNA, 40 bp, Artificial Sequence
  Description of Artificial Sequence: Synthetic primer
gtcgtaaaactgaattatcttccacggcaaaatctaaagc

SEQ ID NO: 24015 - DNA, 40 bp, Artificial Sequence
  Description of Artificial Sequence: Synthetic primer
tcttcgcttccctttttcttccccttctttatctttcttc

SEQ ID NO: 24016 - DNA, 40 bp, Artificial Sequence
  Description of Artificial Sequence: Synthetic primer
atgatctattcatgaaaaatatgccgaaggctaaatatgc

SEQ ID NO: 24017 - DNA, 40 bp, Artificial Sequence
  Description of Artificial Sequence: Synthetic primer
caactgatcctggagtgcaatctgtctggctttaagatgg

SEQ ID NO: 24018 - DNA, 40 bp, Artificial Sequence
  Description of Artificial Sequence: Synthetic primer
tttgaaatatttaattgggagactagaccatttctttttc

SEQ ID NO: 24019 - DNA, 40 bp, Artificial Sequence
  Description of Artificial Sequence: Synthetic primer
ggatccgcaccagtttggggaaagcctgggggcctgagac

SEQ ID NO: 24020 - DNA, 40 bp, Artificial Sequence
  Description of Artificial Sequence: Synthetic primer
atgggagagagaagtcttggccttagagcaagtccagttc

SEQ ID NO: 24021 - DNA, 40 bp, Artificial Sequence
  Description of Artificial Sequence: Synthetic primer
agtattgatgatgaacatttgataatgaatgttcttgtat

SEQ ID NO: 24022 - DNA, 40 bp, Artificial Sequence
  Description of Artificial Sequence: Synthetic primer
ctgtgtgggttcccggcattggtcgctcaatctccaggtc

SEQ ID NO: 24023 - DNA, 40 bp, Artificial Sequence
  Description of Artificial Sequence: Synthetic primer
tttagctttctccctctttttgatgctgtaatttttgttc

SEQ ID NO: 24024 - DNA, 40 bp, Artificial Sequence
  Description of Artificial Sequence: Synthetic primer
atgttaaagatgcacagaatatgtatgtatagtttttacc

SEQ ID NO: 24025 - DNA, 40 bp, Artificial Sequence
  Description of Artificial Sequence: Synthetic primer
gggagcgctcgcctcgctgggcagcctcaacatcccctac

SEQ ID NO: 24026 - DNA, 40 bp, Artificial Sequence
  Description of Artificial Sequence: Synthetic primer
gccaggctaccagggaggtcaaagaaatgaagaaagtcac

SEQ ID NO: 24027 - DNA, 40 bp, Artificial Sequence
  Description of Artificial Sequence: Synthetic primer
agtgtccagggagggagctgggctgggggccgggggagtg

SEQ ID NO: 24028 - DNA, 40 bp, Artificial Sequence
  Description of Artificial Sequence: Synthetic primer
ctgaataattggtacagtttttaggagtttttctgtgttc

SEQ ID NO: 24029 - DNA, 40 bp, Artificial Sequence
  Description of Artificial Sequence: Synthetic primer
agagaatgtatttaatgttcccatcaccagagtcaatatc

SEQ ID NO: 24030 - DNA, 40 bp, Artificial Sequence
  Description of Artificial Sequence: Synthetic primer
ctgtgctgtttttaacaatgaggtggttgaccttcaatgg

SEQ ID NO: 24031 - DNA, 40 bp, Artificial Sequence
  Description of Artificial Sequence: Synthetic primer
tttaaagggtataaataaaatgatttgtaacaagctgatg

SEQ ID NO: 24032 - DNA, 40 bp, Artificial Sequence
  Description of Artificial Sequence: Synthetic primer
cagtccggcagcacacattactctgcgtacaaaacgattg

SEQ ID NO: 24033 - DNA, 40 bp, Artificial Sequence
  Description of Artificial Sequence: Synthetic primer
tgaagctcctcttcttgatgactttgtcatgtcttacctc

SEQ ID NO: 24034 - DNA, 40 bp, Artificial Sequence
  Description of Artificial Sequence: Synthetic primer
tccaggacttgtgcccttgccccatcacgacagacaaagc

SEQ ID NO: 24035 - DNA, 40 bp, Artificial Sequence
  Description of Artificial Sequence: Synthetic primer
agccccagacacatactgcttctctgtgtcagtgaccttc

SEQ ID NO: 24036 - DNA, 40 bp, Artificial Sequence
  Description of Artificial Sequence: Synthetic primer
tctgcaggagctgaagaaggaactgccacagggtgatagc

SEQ ID NO: 24037 - DNA, 40 bp, Artificial Sequence
  Description of Artificial Sequence: Synthetic primer
tccctgctttcagagtttatattgtacctgcctaatccac

SEQ ID NO: 24038 - DNA, 40 bp, Artificial Sequence
  Description of Artificial Sequence: Synthetic primer
tgaagagcacttgaactgaaaaacaaatgtcctaagagtc

SEQ ID NO: 24039 - DNA, 40 bp, Artificial Sequence
  Description of Artificial Sequence: Synthetic primer
acattgctttatttctaataataaccaagacttttcaagc

SEQ ID NO: 24040 - DNA, 40 bp, Artificial Sequence
  Description of Artificial Sequence: Synthetic primer
ttgttggaggaaacacctgaggagaaacaaaccaccattg

SEQ ID NO: 24041 - DNA, 40 bp, Artificial Sequence
  Description of Artificial Sequence: Synthetic primer
aaaggtaatgatattacaatttatggcaatgactttatgg

SEQ ID NO: 24042 - DNA, 40 bp, Artificial Sequence
  Description of Artificial Sequence: Synthetic primer
cactgaagaaactcaagggaatgtgtatttgaaggaaatg

SEQ ID NO: 24043 - DNA, 40 bp, Artificial Sequence
  Description of Artificial Sequence: Synthetic primer
gtttgcctactctcagaattccttggaatggcaatgtacc

SEQ ID NO: 24044 - DNA, 40 bp, Artificial Sequence
  Description of Artificial Sequence: Synthetic primer
gccaaatccaggcacaatgttgaccacaccagggggaaag

SEQ ID NO: 24045 - DNA, 40 bp, Artificial Sequence
  Description of Artificial Sequence: Synthetic primer
gagacacgagtgattgctgtgctgggcaaagctggtcagg

SEQ ID NO: 24046 - DNA, 40 bp, Artificial Sequence
  Description of Artificial Sequence: Synthetic primer
ggcacgttgctttcgctcgtcttccagttccgtctcatac

SEQ ID NO: 24047 - DNA, 40 bp, Artificial Sequence
  Description of Artificial Sequence: Synthetic primer
cttaaacagagcacaaataccaagcaataataaatagttc

SEQ ID NO: 24048 - DNA, 40 bp, Artificial Sequence
  Description of Artificial Sequence: Synthetic primer
ttcatcatgattaagatgattcctagatttagcacaatgg

SEQ ID NO: 24049 - DNA, 40 bp, Artificial Sequence
  Description of Artificial Sequence: Synthetic primer
acagggcccacacctccagcccttctaaaacatagttagc

SEQ ID NO: 24050 - DNA, 40 bp, Artificial Sequence
  Description of Artificial Sequence: Synthetic primer
ccatcactgtcactgtaatctacattccatcacctttatc

SEQ ID NO: 24051 - DNA, 40 bp, Artificial Sequence
  Description of Artificial Sequence: Synthetic primer
ccagcatttgccgccgttcttgcagggcgaggagtcacac

SEQ ID NO: 24052 - DNA, 40 bp, Artificial Sequence
  Description of Artificial Sequence: Synthetic primer
agaaaatcttgaagaaactctgcaactagaaatagaaaac

SEQ ID NO: 24053 - DNA, 40 bp, Artificial Sequence
  Description of Artificial Sequence: Synthetic primer
atatgcaaaacccattggacgaccgaaaaataaattaaag

SEQ ID NO: 24054 - DNA, 40 bp, Artificial Sequence
  Description of Artificial Sequence: Synthetic primer
gcgtgaaactgaggctccagctccctgtgttgtgtgtgtg

SEQ ID NO: 24055 - DNA, 40 bp, Artificial Sequence
  Description of Artificial Sequence: Synthetic primer
gtggtgcgtgttgcccgcgtccacacagagccctccatgc

SEQ ID NO: 24056 - DNA, 40 bp, Artificial Sequence
  Description of Artificial Sequence: Synthetic primer
tgctgctcttgctgctgaaggagatgtctctgctgctctg

SEQ ID NO: 24057 - DNA, 40 bp, Artificial Sequence
  Description of Artificial Sequence: Synthetic primer
ctgcactttcttgttcatttgctggattttgggtcacctg

SEQ ID NO: 24058 - DNA, 40 bp, Artificial Sequence
  Description of Artificial Sequence: Synthetic primer
agctagatcacgtttcacaattagtggttattcttttctg

SEQ ID NO: 24059 - DNA, 40 bp, Artificial Sequence
  Description of Artificial Sequence: Synthetic primer
ttcagatatttagagatttctgtaccaaattcaacaaagc

SEQ ID NO: 24060 - DNA, 40 bp, Artificial Sequence
  Description of Artificial Sequence: Synthetic primer
aacggatttacatctgttcttctaccagacctggattctg

SEQ ID NO: 24061 - DNA, 40 bp, Artificial Sequence
  Description of Artificial Sequence: Synthetic primer
ttatttatttcaattaactaaaaattccaaaacttatcac

SEQ ID NO: 24062 - DNA, 40 bp, Artificial Sequence
  Description of Artificial Sequence: Synthetic primer
atttgcaactttggatattgatggtgtaagaaaaataatc

SEQ ID NO: 24063 - DNA, 40 bp, Artificial Sequence
  Description of Artificial Sequence: Synthetic primer
ccaacatcacaggatcgagggcgtcctgacagggactgaa

SEQ ID NO: 24064 - DNA, 40 bp, Artificial Sequence
  Description of Artificial Sequence: Synthetic primer
actcccggcactccatgcttagtcactgcctgcagaggtc

SEQ ID NO: 24065 - DNA, 40 bp, Artificial Sequence
  Description of Artificial Sequence: Synthetic primer
ctgaatatcaagaacctatctctaaaaggcatttatcagg

SEQ ID NO: 24066 - DNA, 40 bp, Artificial Sequence
  Description of Artificial Sequence: Synthetic primer
caggcatagaagacaatagacagtgtgcgttatgtttgac

SEQ ID NO: 24067 - DNA, 40 bp, Artificial Sequence
  Description of Artificial Sequence: Synthetic primer
aacacataaagtatgccatgagcaatataacatcacaaac

SEQ ID NO: 24068 - DNA, 40 bp, Artificial Sequence
  Description of Artificial Sequence: Synthetic primer
cggactgactggctacccacaaactgagataaaagaagag

SEQ ID NO: 24069 - DNA, 40 bp, Artificial Sequence
  Description of Artificial Sequence: Synthetic primer
ctccccttcaacagcctggccccctgagggctgggtctcc

SEQ ID NO: 24070 - DNA, 40 bp, Artificial Sequence
  Description of Artificial Sequence: Synthetic primer
agtcatgctgctagatctttattatggaaaacatttcaag

SEQ ID NO: 24071 - DNA, 40 bp, Artificial Sequence
  Description of Artificial Sequence: Synthetic primer
ggtctgacaaagcactaggacctgtttgacctaaaagttg

SEQ ID NO: 24072 - DNA, 40 bp, Artificial Sequence
  Description of Artificial Sequence: Synthetic primer
ttgggggtctccagttttcatctcctcatctgtgatggtg

SEQ ID NO: 24073 - DNA, 40 bp, Artificial Sequence
  Description of Artificial Sequence: Synthetic primer
ggggctccccacgaagtaaccctgtgcgcttgctcttttc

SEQ ID NO: 24074 - DNA, 40 bp, Artificial Sequence
  Description of Artificial Sequence: Synthetic primer
tgaagagtcccaatttgtatatcagtgttaagaagaaaac

SEQ ID NO: 24075 - DNA, 40 bp, Artificial Sequence
  Description of Artificial Sequence: Synthetic primer
cttcccatcactcataagaagcacatgattagcatagacc

SEQ ID NO: 24076 - DNA, 40 bp, Artificial Sequence
  Description of Artificial Sequence: Synthetic primer
tgagcctggtccccccggccctgctggctttgctggcccc

SEQ ID NO: 24077 - DNA, 40 bp, Artificial Sequence
  Description of Artificial Sequence: Synthetic primer
cgggatccactgtgagaacaacacgcctgactgcacagag

SEQ ID NO: 24078 - DNA, 40 bp, Artificial Sequence
  Description of Artificial Sequence: Synthetic primer
accagcacaatctacaatgcccggccagcccaccctgatg

SEQ ID NO: 24079 - DNA, 40 bp, Artificial Sequence
  Description of Artificial Sequence: Synthetic primer
tggctctgagaatgttctccttgctgctgcacctggactg

SEQ ID NO: 24080 - DNA, 40 bp, Artificial Sequence
  Description of Artificial Sequence: Synthetic primer
ggtttccatgagcacagtggctgctttggagacagtaatc

SEQ ID NO: 24081 - DNA, 40 bp, Artificial Sequence
  Description of Artificial Sequence: Synthetic primer
atgaaagtgtgaattagagggactccttccaataaagttc

SEQ ID NO: 24082 - DNA, 40 bp, Artificial Sequence
  Description of Artificial Sequence: Synthetic primer
ttgtctttgccactaccaatggacagttacatggacttag

SEQ ID NO: 24083 - DNA, 40 bp, Artificial Sequence
  Description of Artificial Sequence: Synthetic primer
cactttttcgctatttaagttggatatttctctacattcc

SEQ ID NO: 24084 - DNA, 40 bp, Artificial Sequence
  Description of Artificial Sequence: Synthetic primer
cagaatatcactcttattttgagaatgtttgcctaaaatc

SEQ ID NO: 24085 - DNA, 40 bp, Artificial Sequence
  Description of Artificial Sequence: Synthetic primer
ccgtcgtaagaagaaggagtatgtggagtgtctagaaaag

SEQ ID NO: 24086 - DNA, 40 bp, Artificial Sequence
  Description of Artificial Sequence: Synthetic primer
atatgattatttagagaatacgataccacagaaacagcac

SEQ ID NO: 24087 - DNA, 40 bp, Artificial Sequence
  Description of Artificial Sequence: Synthetic primer
atctgcaaagctgactcgacgagagtttttcttatttctc

SEQ ID NO: 24088 - DNA, 40 bp, Artificial Sequence
  Description of Artificial Sequence: Synthetic primer
ctgctgtgtgactcgttctgggtaccatctccccatcatc

SEQ ID NO: 24089 - DNA, 40 bp, Artificial Sequence
  Description of Artificial Sequence: Synthetic primer
gcttaaagagagagtgtgatcagtttcagaaagaacaatc

SEQ ID NO: 24090 - DNA, 40 bp, Artificial Sequence
  Description of Artificial Sequence: Synthetic primer
tgcacctgacagcatctattacctttgccttggaatacag

SEQ ID NO: 24091 - DNA, 40 bp, Artificial Sequence
  Description of Artificial Sequence: Synthetic primer
acctgggcaggctgcgtggactcgacagctcttccacagc

SEQ ID NO: 24092 - DNA, 40 bp, Artificial Sequence
  Description of Artificial Sequence: Synthetic primer
aaagttgaaagaaataagcacatctgagcctgcgcctttg

SEQ ID NO: 24093 - DNA, 40 bp, Artificial Sequence
  Description of Artificial Sequence: Synthetic primer
tctcaaaagtcacctgagctcaccatcttcatagccaacc

SEQ ID NO: 24094 - DNA, 40 bp, Artificial Sequence
  Description of Artificial Sequence: Synthetic primer
cgctggtcctcctggcttccctggtgctgttggtgctaag

SEQ ID NO: 24095 - DNA, 40 bp, Artificial Sequence
  Description of Artificial Sequence: Synthetic primer
cctttagaaaaggcatagtaatcatagccgtcaggttttc

SEQ ID NO: 24096 - DNA, 40 bp, Artificial Sequence
  Description of Artificial Sequence: Synthetic primer
acgtgacttcaaatgttccatgattaagacctcatctaac

SEQ ID NO: 24097 - DNA, 40 bp, Artificial Sequence
  Description of Artificial Sequence: Synthetic primer
catcaataatattaggaaaatcgcaatataactgtaaatc

SEQ ID NO: 24098 - DNA, 40 bp, Artificial Sequence
  Description of Artificial Sequence: Synthetic primer
tgcagtcctggagctgcagcacagcctccacagggtcagc

SEQ ID NO: 24099 - DNA, 40 bp, Artificial Sequence
  Description of Artificial Sequence: Synthetic primer
cctgcagccccagtctccatacagcgcagcgccccaggtg

SEQ ID NO: 24100 - DNA, 40 bp, Artificial Sequence
  Description of Artificial Sequence: Synthetic primer
gcacccatcatgttcggaggctgaggcattcgggaaggag

SEQ ID NO: 24101 - DNA, 40 bp, Artificial Sequence
  Description of Artificial Sequence: Synthetic primer
tgttgttatagtgaagcaagaatcagatgaagaatctagg

SEQ ID NO: 24102 - DNA, 40 bp, Artificial Sequence
  Description of Artificial Sequence: Synthetic primer
tcataaccagaaagtagaaattctgagaaaaatgttacag

SEQ ID NO: 24103 - DNA, 40 bp, Artificial Sequence
  Description of Artificial Sequence: Synthetic primer
tcgcctttagcaccagcatcaccaggttcgcctttagcac

SEQ ID NO: 24104 - DNA, 40 bp, Artificial Sequence
  Description of Artificial Sequence: Synthetic primer
cctgcagatcctgccctacacactggcctccctctaccac

SEQ ID NO: 24105 - DNA, 40 bp, Artificial Sequence
  Description of Artificial Sequence: Synthetic primer
agttcaaatttagttttggagagttggtacttaagttttt

SEQ ID NO: 24106 - DNA, 40 bp, Artificial Sequence
  Description of Artificial Sequence: Synthetic primer
cttggcttcattcacaatgctttctaaacttgccacactg

SEQ ID NO: 24107 - DNA, 40 bp, Artificial Sequence
  Description of Artificial Sequence: Synthetic primer
gtttcatcaaatcctccaggctctcaccttctctcaaaag

SEQ ID NO: 24108 - DNA, 40 bp, Artificial Sequence
  Description of Artificial Sequence: Synthetic primer
accaaattcaatcacagaagggtaccggccacagtcttcc

SEQ ID NO: 24109 - DNA, 40 bp, Artificial Sequence
  Description of Artificial Sequence: Synthetic primer
gctattctttggtttttctagtagtttatctcattttacc

SEQ ID NO: 24110 - DNA, 40 bp, Artificial Sequence
  Description of Artificial Sequence: Synthetic primer
aagcagatagcacatacccccacccagtaccaaatttcag

SEQ ID NO: 24111 - DNA, 40 bp, Artificial Sequence
  Description of Artificial Sequence: Synthetic primer
ctgttctttctgtaacatttttctcagaatttctactttc

SEQ ID NO: 24112 - DNA, 40 bp, Artificial Sequence
  Description of Artificial Sequence: Synthetic primer
ctgcaccagccattgacatattttctacccctagttcttc

SEQ ID NO: 24113 - DNA, 40 bp, Artificial Sequence
  Description of Artificial Sequence: Synthetic primer
tctcgccaggtaggtctgggccaggttcttgagtttgaag

SEQ ID NO: 24114 - DNA, 40 bp, Artificial Sequence
  Description of Artificial Sequence: Synthetic primer
tatcataagagagcatcatatatgtttggagattagaatg

SEQ ID NO: 24115 - DNA, 40 bp, Artificial Sequence
  Description of Artificial Sequence: Synthetic primer
tgtgtgccgcgtagtgaaaatcctcttgtcagggggtatc

SEQ ID NO: 24116 - DNA, 40 bp, Artificial Sequence
  Description of Artificial Sequence: Synthetic primer
tgtgaatgcattcatggatccttcatcactggttacagac

SEQ ID NO: 24117 - DNA, 40 bp, Artificial Sequence
  Description of Artificial Sequence: Synthetic primer
gcggctgcgcgctgtcttctggcgccgcaccgggctcagg

SEQ ID NO: 24118 - DNA, 40 bp, Artificial Sequence
  Description of Artificial Sequence: Synthetic primer
ccccgaggtcccccaggtccccctggaaagaatggagatg

SEQ ID NO: 24119 - DNA, 40 bp, Artificial Sequence
  Description of Artificial Sequence: Synthetic primer
ggtgatcctgagagcacacgattcccaacagttacacaac

SEQ ID NO: 24120 - DNA, 40 bp, Artificial Sequence
  Description of Artificial Sequence: Synthetic primer
ccgcctgggtcccaaacgtggcagctgctcttccagtctc

SEQ ID NO: 24121 - DNA, 40 bp, Artificial Sequence
  Description of Artificial Sequence: Synthetic primer
agtaaaaatcctattaatgtgaaccagccaggaataacag

SEQ ID NO: 24122 - DNA, 40 bp, Artificial Sequence
  Description of Artificial Sequence: Synthetic primer
cggtgcccacagccttgaggatccttccaataaaggtgtc

SEQ ID NO: 24123 - DNA, 40 bp, Artificial Sequence
  Description of Artificial Sequence: Synthetic primer
aagtgtaaatatgttcttaaatgtttggcctttttatctg

SEQ ID NO: 24124 - DNA, 40 bp, Artificial Sequence
  Description of Artificial Sequence: Synthetic primer
cggtcaaagcactggctcataatgggattctttgagctac

SEQ ID NO: 24125 - DNA, 40 bp, Artificial Sequence
  Description of Artificial Sequence: Synthetic primer
gtcagattgctcagcctagttcaagcagtgagactacctc

SEQ ID NO: 24126 - DNA, 40 bp, Artificial Sequence
  Description of Artificial Sequence: Synthetic primer
ggataagtcttcatggtctttgtgcatacccagaaaattg

SEQ ID NO: 24127 - DNA, 40 bp, Artificial Sequence
  Description of Artificial Sequence: Synthetic primer
ctgccccctgctgggggaggccgactggttgtttgtctcc

SEQ ID NO: 24128 - DNA, 40 bp, Artificial Sequence
  Description of Artificial Sequence: Synthetic primer
ccttctcgggtggcatagatgcagacatagaactcctcag

SEQ ID NO: 24129 - DNA, 40 bp, Artificial Sequence
  Description of Artificial Sequence: Synthetic primer
catcgccctgccgcaccagggcctgccggatggtgtccag

SEQ ID NO: 24130 - DNA, 40 bp, Artificial Sequence
  Description of Artificial Sequence: Synthetic primer
caagaaagggcgcccaactactgccggaagcaaaataaag

SEQ ID NO: 24131 - DNA, 40 bp, Artificial Sequence
  Description of Artificial Sequence: Synthetic primer
cctgcttgcctcgtagtcgacccgtccaccagccagaagg

SEQ ID NO: 24132 - DNA, 40 bp, Artificial Sequence
  Description of Artificial Sequence: Synthetic primer
cgggagtggccaccccgcctctagctgctgagaccccaga

SEQ ID NO: 24133 - DNA, 40 bp, Artificial Sequence
  Description of Artificial Sequence: Synthetic primer
gcacggccaggcccacgagtccaggggttctcccatcttc

SEQ ID NO: 24134 - DNA, 40 bp, Artificial Sequence
  Description of Artificial Sequence: Synthetic primer
gaattattacgatatactttgattttgtagttgctaggag

SEQ ID NO: 24135 - DNA, 40 bp, Artificial Sequence
  Description of Artificial Sequence: Synthetic primer
tgactatttctagagagagtggtcagctgagtgcatactg

SEQ ID NO: 24136 - DNA, 40 bp, Artificial Sequence
  Description of Artificial Sequence: Synthetic primer
tgttttaaaacactctacatataaaacagcattattcaac

SEQ ID NO: 24137 - DNA, 40 bp, Artificial Sequence
  Description of Artificial Sequence: Synthetic primer
tggcttccaactagtagcgctatttccgaaggtctaatac

SEQ ID NO: 24138 - DNA, 40 bp, Artificial Sequence
  Description of Artificial Sequence: Synthetic primer
tcaccctgaagaactgggaggccctccactgaagaagctg

SEQ ID NO: 24139 - DNA, 40 bp, Artificial Sequence
  Description of Artificial Sequence: Synthetic primer
tccatgggcataagactgtggggcttcaagcaataacaag

SEQ ID NO: 24140 - DNA, 40 bp, Artificial Sequence
  Description of Artificial Sequence: Synthetic primer
tggcctcatgcaatcatttgtctgtatatgttactctaag

SEQ ID NO: 24141 - DNA, 40 bp, Artificial Sequence
  Description of Artificial Sequence: Synthetic primer
ttctccacggcttcagtttctgatggatctagccatgttg

SEQ ID NO: 24142 - DNA, 40 bp, Artificial Sequence
  Description of Artificial Sequence: Synthetic primer
agaaaaaatacttcgcaaaatcccaaagcaaaattaccag

SEQ ID NO: 24143 - DNA, 40 bp, Artificial Sequence
  Description of Artificial Sequence: Synthetic primer
cggaggccagtgcctggcgtcgtgctggtgctgcgatgac

SEQ ID NO: 24144 - DNA, 40 bp, Artificial Sequence
  Description of Artificial Sequence: Synthetic primer
cacagagaactccatcgtggagaatctgaagaagagatac

SEQ ID NO: 24145 - DNA, 40 bp, Artificial Sequence
  Description of Artificial Sequence: Synthetic primer
gtacatttcttatcttagacttctatatgcaccttgtagc

SEQ ID NO: 24146 - DNA, 40 bp, Artificial Sequence
  Description of Artificial Sequence: Synthetic primer
caactacattagaaggatcttcccctctggaaatgtcacc

SEQ ID NO: 24147 - DNA, 40 bp, Artificial Sequence
  Description of Artificial Sequence: Synthetic primer
tgcctgtgcctccggggtggccctgaccttgtccttgacc

SEQ ID NO: 24148 - DNA, 40 bp, Artificial Sequence
  Description of Artificial Sequence: Synthetic primer
acaaactggagagagaccagacctgcaagctctttgacac

SEQ ID NO: 24149 - DNA, 40 bp, Artificial Sequence
  Description of Artificial Sequence: Synthetic primer
caaattcagttttgaaatatatataaagaggtgagtttac

SEQ ID NO: 24150 - DNA, 40 bp, Artificial Sequence
  Description of Artificial Sequence: Synthetic primer
atatctgaatgttcatgaaggtcctagctttatattgtcc

SEQ ID NO: 24151 - DNA, 40 bp, Artificial Sequence
  Description of Artificial Sequence: Synthetic primer
aggtcgtagctgtagcgccagagtggcttgtcattgatgg

SEQ ID NO: 24152 - DNA, 40 bp, Artificial Sequence
  Description of Artificial Sequence: Synthetic primer
ccatcagttgattggccccagcttgcttcctccatcttgc

SEQ ID NO: 24153 - DNA, 40 bp, Artificial Sequence
  Description of Artificial Sequence: Synthetic primer
gaaggggtgttgtactggcccatcactccctttactcctg

SEQ ID NO: 24154 - DNA, 40 bp, Artificial Sequence
  Description of Artificial Sequence: Synthetic primer
cttggtttctgacagtccattgtcgccacataaaacaatg

SEQ ID NO: 24155 - DNA, 40 bp, Artificial Sequence
  Description of Artificial Sequence: Synthetic primer
cttcctgtgtgtcagggcttctcgcagcgtcgagccttcc

SEQ ID NO: 24156 - DNA, 40 bp, Artificial Sequence
  Description of Artificial Sequence: Synthetic primer
accggtgacaagtcagtgtgacaggcagtggtgtgacagg

SEQ ID NO: 24157 - DNA, 40 bp, Artificial Sequence
  Description of Artificial Sequence: Synthetic primer
tccaaggcatacaaacaactcccaaagcagccattatttg

SEQ ID NO: 24158 - DNA, 40 bp, Artificial Sequence
  Description of Artificial Sequence: Synthetic primer
agcacctaagagcgcagctgcatttggaagtgctcacagc

SEQ ID NO: 24159 - DNA, 40 bp, Artificial Sequence
  Description of Artificial Sequence: Synthetic primer
tggccaggacacctctcctcctgattcccttggcaccttg

SEQ ID NO: 24160 - DNA, 40 bp, Artificial Sequence
  Description of Artificial Sequence: Synthetic primer
tgcttgcaaatcatggacacaattgtcttgtttcatactc

SEQ ID NO: 24161 - DNA, 40 bp, Artificial Sequence
  Description of Artificial Sequence: Synthetic primer
ggcccgccccctctgactaggcacccaaagtgagcatctg

SEQ ID NO: 24162 - DNA, 40 bp, Artificial Sequence
  Description of Artificial Sequence: Synthetic primer
ggatctgtcagagagccggggccgccgtgacctgccaatc

SEQ ID NO: 24163 - DNA, 40 bp, Artificial Sequence
  Description of Artificial Sequence: Synthetic primer
gcctgccgtctcgtcataggtgaaactgaccttggtggtg

SEQ ID NO: 24164 - DNA, 40 bp, Artificial Sequence
  Description of Artificial Sequence: Synthetic primer
ggaaaaaaatgcttaggtggttcctgaagatgaagctctg

SEQ ID NO: 24165 - DNA, 40 bp, Artificial Sequence
  Description of Artificial Sequence: Synthetic primer
cccactcctcgccagtccagtctctgctgagagcacaagg

SEQ ID NO: 24166 - DNA, 40 bp, Artificial Sequence
  Description of Artificial Sequence: Synthetic primer
aaatatatttatacatttatatgcctaatgctttttatgc

SEQ ID NO: 24167 - DNA, 40 bp, Artificial Sequence
  Description of Artificial Sequence: Synthetic primer
cgatttgctgggtgaaatttgtggaggaggtttaactttg

SEQ ID NO: 24168 - DNA, 40 bp, Artificial Sequence
  Description of Artificial Sequence: Synthetic primer
tcccacaggattagatctgggcaggattcatattcataac

SEQ ID NO: 24169 - DNA, 40 bp, Artificial Sequence
  Description of Artificial Sequence: Synthetic primer
ggctgtcttggtcagcgtctcaatcacgtggtcactctgc

SEQ ID NO: 24170 - DNA, 40 bp, Artificial Sequence
  Description of Artificial Sequence: Synthetic primer
ataatttagttatggctacaaaacatcagaagattttttt

SEQ ID NO: 24171 - DNA, 40 bp, Artificial Sequence
  Description of Artificial Sequence: Synthetic primer
cgaccccgaggaggaggattcgcaagccgagaccaaatcc

SEQ ID NO: 24172 - DNA, 40 bp, Artificial Sequence
  Description of Artificial Sequence: Synthetic primer
gagactccgctctcccggctgcgcgttcgctcgctctctc

SEQ ID NO: 24173 - DNA, 40 bp, Artificial Sequence
  Description of Artificial Sequence: Synthetic primer
tgttactctgtcgagtggctattaaaattgtcttatgctc

SEQ ID NO: 24174 - DNA, 40 bp, Artificial Sequence
  Description of Artificial Sequence: Synthetic primer
tttccagaggcaatggctggacccagtgatggtacatctg

SEQ ID NO: 24175 - DNA, 40 bp, Artificial Sequence
  Description of Artificial Sequence: Synthetic primer
actgcttcacagatgttgtctaagcggtttatcattactc

SEQ ID NO: 24176 - DNA, 40 bp, Artificial Sequence
  Description of Artificial Sequence: Synthetic primer
cctggtcccgacgctccgtgcgcagtgctcggtacacagt

SEQ ID NO: 24177 - DNA, 40 bp, Artificial Sequence
  Description of Artificial Sequence: Synthetic primer
gtcgatctattcagtttgcaagcattgagaagactcacag

SEQ ID NO: 24178 - DNA, 40 bp, Artificial Sequence
  Description of Artificial Sequence: Synthetic primer
atgtccgtgaagaagtagtcattggtcaggaaaagaactc

SEQ ID NO: 24179 - DNA, 40 bp, Artificial Sequence
  Description of Artificial Sequence: Synthetic primer
tcatggtaaaaggtccgttaatgatgccagaagaaagaag

SEQ ID NO: 24180 - DNA, 40 bp, Artificial Sequence
  Description of Artificial Sequence: Synthetic primer
ctcctggtaggacagccactggtaaggctgcttaggcttc

SEQ ID NO: 24181 - DNA, 40 bp, Artificial Sequence
  Description of Artificial Sequence: Synthetic primer
cgcagctacctgggcgctgggcgagggcgggaaccgcttg

SEQ ID NO: 24182 - DNA, 40 bp, Artificial Sequence
  Description of Artificial Sequence: Synthetic primer
ggtggccattgaggcaaagctgagtgacctgcagaaggag

SEQ ID NO: 24183 - DNA, 40 bp, Artificial Sequence
  Description of Artificial Sequence: Synthetic primer
ccagaagccatatgaacacggaatcccagatttggaggtg

SEQ ID NO: 24184 - DNA, 40 bp, Artificial Sequence
  Description of Artificial Sequence: Synthetic primer
tttgttttttgtttttgtttctacatccttccccgactcc

SEQ ID NO: 24185 - DNA, 40 bp, Artificial Sequence
  Description of Artificial Sequence: Synthetic primer
agctccttcatgaaagaacatttgccttctcgttttggcc

SEQ ID NO: 24186 - DNA, 40 bp, Artificial Sequence
  Description of Artificial Sequence: Synthetic primer
gagacgtgccagaagatggaagaagacgggtccactgtgc

SEQ ID NO: 24187 - DNA, 40 bp, Artificial Sequence
  Description of Artificial Sequence: Synthetic primer
cagcatggaggactctgccaaagccaacatgacactgacc

SEQ ID NO: 24188 - DNA, 40 bp, Artificial Sequence
  Description of Artificial Sequence: Synthetic primer
gcagcaaatctttatcgaacttaccctgaaggccgagcag

SEQ ID NO: 24189 - DNA, 40 bp, Artificial Sequence
  Description of Artificial Sequence: Synthetic primer
aaatgggcagctcccacgtccttcatcaaaatacctgcac

SEQ ID NO: 24190 - DNA, 40 bp, Artificial Sequence
  Description of Artificial Sequence: Synthetic primer
tactcattttccctcaagagaagctcataagtgtgtgtgg

SEQ ID NO: 24191 - DNA, 40 bp, Artificial Sequence
  Description of Artificial Sequence: Synthetic primer
tttctagaaagtgtccaaaaagcagtatttctttcccttg

SEQ ID NO: 24192 - DNA, 40 bp, Artificial Sequence
  Description of Artificial Sequence: Synthetic primer
cagctcgtagtacttggcctgttcttctcgagacaggttg

SEQ ID NO: 24193 - DNA, 40 bp, Artificial Sequence
  Description of Artificial Sequence: Synthetic primer
tttctgtacatattatctgcaagggcatagatatgtggtg

SEQ ID NO: 24194 - DNA, 40 bp, Artificial Sequence
  Description of Artificial Sequence: Synthetic primer
gtcgccggcggagcttctgggagcgcatccggtcacattt

SEQ ID NO: 24195 - DNA, 40 bp, Artificial Sequence
  Description of Artificial Sequence: Synthetic primer
tcggccagtaacccccgtgtttgcacctttgtctggattc

SEQ ID NO: 24196 - DNA, 40 bp, Artificial Sequence
  Description of Artificial Sequence: Synthetic primer
tgccttcttcggtgacggcgctgggtcaggccaggtcctc

SEQ ID NO: 24197 - DNA, 40 bp, Artificial Sequence
  Description of Artificial Sequence: Synthetic primer
tctcgtccctctcgttgatcaggaccgagttgtaatagtc

SEQ ID NO: 24198 - DNA, 40 bp, Artificial Sequence
  Description of Artificial Sequence: Synthetic primer
ttgaccaagttcttgaatcgtgcctttaaagtttttgtag

SEQ ID NO: 24199 - DNA, 40 bp, Artificial Sequence
  Description of Artificial Sequence: Synthetic primer
ttttttctttcttttcttttttaaatcattcagtttaagg

SEQ ID NO: 24200 - DNA, 40 bp, Artificial Sequence
  Description of Artificial Sequence: Synthetic primer
aggaccattggcttgccaagagtacagaaattcattatgc

SEQ ID NO: 24201 - DNA, 40 bp, Artificial Sequence
  Description of Artificial Sequence: Synthetic primer
aagcagtaagctgcatgcttgcttgttgtggtcattaaaa

SEQ ID NO: 24202 - DNA, 40 bp, Artificial Sequence
  Description of Artificial Sequence: Synthetic primer
ggcctgaaggccaggccgcagcgtcccaatagtccggttg

SEQ ID NO: 24203 - DNA, 40 bp, Artificial Sequence
  Description of Artificial Sequence: Synthetic primer
aggaaggatcatcctctacgggttgcaaaatcactctgga

SEQ ID NO: 24204 - DNA, 40 bp, Artificial Sequence
  Description of Artificial Sequence: Synthetic primer
gttctattaggaattctggagtatgtttttctttgttttc

SEQ ID NO: 24205 - DNA, 40 bp, Artificial Sequence
  Description of Artificial Sequence: Synthetic primer
atccaggcatatagtattttcaagaaatgactgaggtagg

SEQ ID NO: 24206 - DNA, 40 bp, Artificial Sequence
  Description of Artificial Sequence: Synthetic primer
tcccaacgccgcaccttcccgctgggggcccgggcatctg

SEQ ID NO: 24207 - DNA, 40 bp, Artificial Sequence
  Description of Artificial Sequence: Synthetic primer
aaaaaaatgaaataaagcatgtttggttttccaaaagaac

SEQ ID NO: 24208 - DNA, 40 bp, Artificial Sequence
  Description of Artificial Sequence: Synthetic primer
agggcaactgttttgttcaactttatgggggtttctaggg

SEQ ID NO: 24209 - DNA, 40 bp, Artificial Sequence
  Description of Artificial Sequence: Synthetic primer
acctggagtcccactggggtatcccatcaaggcccccaag

SEQ ID NO: 24210 - DNA, 40 bp, Artificial Sequence
  Description of Artificial Sequence: Synthetic primer
tgtacaagtgctgttggtgtagtactactgaggtgtaagc

SEQ ID NO: 24211 - DNA, 40 bp, Artificial Sequence
  Description of Artificial Sequence: Synthetic primer
agcttctattttcttctttctttatacagggatctgcttc

SEQ ID NO: 24212 - DNA, 40 bp, Artificial Sequence
  Description of Artificial Sequence: Synthetic primer
atccgactacagtggtctcgaatatggcatgtgattggag

SEQ ID NO: 24213 - DNA, 40 bp, Artificial Sequence
  Description of Artificial Sequence: Synthetic primer
ataagcaaatgctttgcacgtgcctgggcaacggagtcag

SEQ ID NO: 24214 - DNA, 40 bp, Artificial Sequence
  Description of Artificial Sequence: Synthetic primer
tgagacttttaaaattgttccatctttaacactcaactcc

SEQ ID NO: 24215 - DNA, 40 bp, Artificial Sequence
  Description of Artificial Sequence: Synthetic primer
tctgtaaagcaatcttcagttatagtcacctcaaaaggtc

SEQ ID NO: 24216 - DNA, 40 bp, Artificial Sequence
  Description of Artificial Sequence: Synthetic primer
ctccacccattcctcagggcccacgtccagggggaccaag

SEQ ID NO: 24217 - DNA, 40 bp, Artificial Sequence
  Description of Artificial Sequence: Synthetic primer
tcctcccagactgtgagattcagttcgtttatgccccaag

SEQ ID NO: 24218 - DNA, 40 bp, Artificial Sequence
  Description of Artificial Sequence: Synthetic primer
tggggttggggaggggaaggagggcagagcagccacagac

SEQ ID NO: 24219 - DNA, 40 bp, Artificial Sequence
  Description of Artificial Sequence: Synthetic primer
tacaagtcctcgtagaaattgaagaggccggagataaaac

SEQ ID NO: 24220 - DNA, 40 bp, Artificial Sequence
  Description of Artificial Sequence: Synthetic primer
atgccatctcctgggggaatgtttcctagcactggactgg

SEQ ID NO: 24221 - DNA, 40 bp, Artificial Sequence
  Description of Artificial Sequence: Synthetic primer
attggactggtacagggtgaggtctccgtcctggaacttg

SEQ ID NO: 24222 - DNA, 40 bp, Artificial Sequence
  Description of Artificial Sequence: Synthetic primer
ctggcactccagttcacctagaactctctcaggttctgtc

SEQ ID NO: 24223 - DNA, 40 bp, Artificial Sequence
  Description of Artificial Sequence: Synthetic primer
agaaaaaatcttctacactcattgtaccgtcaggatcaag

SEQ ID NO: 24224 - DNA, 40 bp, Artificial Sequence
  Description of Artificial Sequence: Synthetic primer
tgacggccgccaggtacacggtccccgccgcgccgtccag

SEQ ID NO: 24225 - DNA, 40 bp, Artificial Sequence
  Description of Artificial Sequence: Synthetic primer
gtgcatgtacgccctctgagatgcaataaacaccttgaac

SEQ ID NO: 24226 - DNA, 40 bp, Artificial Sequence
  Description of Artificial Sequence: Synthetic primer
cgacatctatgtcgtttctgtttcggtttctgaaatgagg

SEQ ID NO: 24227 - DNA, 40 bp, Artificial Sequence
  Description of Artificial Sequence: Synthetic primer
ttaccacctctctatggtattatagtggcagtatgctttg

SEQ ID NO: 24228 - DNA, 40 bp, Artificial Sequence
  Description of Artificial Sequence: Synthetic primer
tgtccgtgagggcgtagatgtgcgggggattctcatactg

SEQ ID NO: 24229 - DNA, 40 bp, Artificial Sequence
  Description of Artificial Sequence: Synthetic primer
gcacttgcaatgggtttccagtcaatggttataagaacac

SEQ ID NO: 24230 - DNA, 40 bp, Artificial Sequence
  Description of Artificial Sequence: Synthetic primer
aaaaccacaaatactggctaggtaagatattcctgaggtc

SEQ ID NO: 24231 - DNA, 40 bp, Artificial Sequence
  Description of Artificial Sequence: Synthetic primer
gagaggcgcccgcagcccgtccgggacactttccagaagc

SEQ ID NO: 24232 - DNA, 40 bp, Artificial Sequence
  Description of Artificial Sequence: Synthetic primer
gcctgctgctgaatgggtggcctgggagaagctggaaaac

SEQ ID NO: 24233 - DNA, 40 bp, Artificial Sequence
  Description of Artificial Sequence: Synthetic primer
cttttcaggaggatatttgtcaaagtagctgtgatctatg

SEQ ID NO: 24234 - DNA, 40 bp, Artificial Sequence
  Description of Artificial Sequence: Synthetic primer
ggagcagggccccgctcttagggagctgctttcaaaaatg

SEQ ID NO: 24235 - DNA, 40 bp, Artificial Sequence
  Description of Artificial Sequence: Synthetic primer
gcagttatctacatttcagaagaaaagcagagacaatcac

SEQ ID NO: 24236 - DNA, 40 bp, Artificial Sequence
  Description of Artificial Sequence: Synthetic primer
tatacaatgtgtgaatataaccgtgcttttaagcattgac

SEQ ID NO: 24237 - DNA, 40 bp, Artificial Sequence
  Description of Artificial Sequence: Synthetic primer
gttgggattctattcaaagagagtgtaaaaatatttgctg

SEQ ID NO: 24238 - DNA, 40 bp, Artificial Sequence
  Description of Artificial Sequence: Synthetic primer
tcagcttgcctctttgccaagacctaggaggcggctctgc

SEQ ID NO: 24239 - DNA, 40 bp, Artificial Sequence
  Description of Artificial Sequence: Synthetic primer
gcagtgcggcgaatctggcccctgcgctccccgcccgtag

SEQ ID NO: 24240 - DNA, 40 bp, Artificial Sequence
  Description of Artificial Sequence: Synthetic primer
ccatgcagggccccagaagcctctcgaatgcttgtacatc

SEQ ID NO: 24241 - DNA, 40 bp, Artificial Sequence
  Description of Artificial Sequence: Synthetic primer
tactattaaaatatcccatgctttgatcaggtggtacatc

SEQ ID NO: 24242 - DNA, 40 bp, Artificial Sequence
  Description of Artificial Sequence: Synthetic primer
tctgtcaagcacatcagcaatcatagattaccttacagac

SEQ ID NO: 24243 - DNA, 40 bp, Artificial Sequence
  Description of Artificial Sequence: Synthetic primer
aaaagtctgaccagcaccagcatttaaattttctgatttt

SEQ ID NO: 24244 - DNA, 40 bp, Artificial Sequence
  Description of Artificial Sequence: Synthetic primer
gagggagcaagaggtgtcggaggtctcatctttgaactac

SEQ ID NO: 24245 - DNA, 40 bp, Artificial Sequence
  Description of Artificial Sequence: Synthetic primer
gcaagtagcagagcgtgaccccacaggccattcttcattg

SEQ ID NO: 24246 - DNA, 40 bp, Artificial Sequence
  Description of Artificial Sequence: Synthetic primer
cgaacctccctggagctgcagctgcctcagatgaccaagg

SEQ ID NO: 24247 - DNA, 40 bp, Artificial Sequence
  Description of Artificial Sequence: Synthetic primer
gtttttcttcattccttttgaggattgggaaaacagaaag

SEQ ID NO: 24248 - DNA, 40 bp, Artificial Sequence
  Description of Artificial Sequence: Synthetic primer
agtggtgtgagcagaagaagtttcctgatttatcagttgg

SEQ ID NO: 24249 - DNA, 40 bp, Artificial Sequence
  Description of Artificial Sequence: Synthetic primer
caggaattcaagtgccagatactcagcatattaggtttcc

SEQ ID NO: 24250 - DNA, 40 bp, Artificial Sequence
  Description of Artificial Sequence: Synthetic primer
gacccgatgcctcttcctgctgagatccctccagtttttc

SEQ ID NO: 24251 - DNA, 40 bp, Artificial Sequence
  Description of Artificial Sequence: Synthetic primer
tgaattcgtggttcaggtcggcctcctcggcagcttccac

SEQ ID NO: 24252 - DNA, 40 bp, Artificial Sequence
  Description of Artificial Sequence: Synthetic primer
ctgcccatactcccgttcaatggctgccctctgcttgctg

SEQ ID NO: 24253 - DNA, 40 bp, Artificial Sequence
  Description of Artificial Sequence: Synthetic primer
ccacttgcttgatctgtggcttcacgtatccatcaacagc

SEQ ID NO: 24254 - DNA, 40 bp, Artificial Sequence
  Description of Artificial Sequence: Synthetic primer
taaaggactgctctgtgtaacactgtgactgccgtgtgtg

SEQ ID NO: 24255 - DNA, 40 bp, Artificial Sequence
  Description of Artificial Sequence: Synthetic primer
cccagcccagggtgggtggggcgcacacctgtctttgtgc

SEQ ID NO: 24256 - DNA, 40 bp, Artificial Sequence
  Description of Artificial Sequence: Synthetic primer
tgattatctggccctggacttccagccgagctccccaagc

SEQ ID NO: 24257 - DNA, 40 bp, Artificial Sequence
  Description of Artificial Sequence: Synthetic primer
aggccgccatgtacacctccacctcaatctcccggaagtc

SEQ ID NO: 24258 - DNA, 40 bp, Artificial Sequence
  Description of Artificial Sequence: Synthetic primer
tgtgtggttttgactaagggcagaattctcagaacaaaac

SEQ ID NO: 24259 - DNA, 40 bp, Artificial Sequence
  Description of Artificial Sequence: Synthetic primer
gcgataagaaccgggcagaccttctcgacaccatcaatac

SEQ ID NO: 24260 - DNA, 40 bp, Artificial Sequence
  Description of Artificial Sequence: Synthetic primer
cggctgaggccatggaaggcagcagcgggggctgggcaag

SEQ ID NO: 24261 - DNA, 40 bp, Artificial Sequence
  Description of Artificial Sequence: Synthetic primer
cggtgttgtttgatccatcaataaggaaaataatgtcagc

SEQ ID NO: 24262 - DNA, 40 bp, Artificial Sequence
  Description of Artificial Sequence: Synthetic primer
tacattaaatcacatgcattagacatgataaatagagttc

SEQ ID NO: 24263 - DNA, 40 bp, Artificial Sequence
  Description of Artificial Sequence: Synthetic primer
tttgcaagtcagatggctgcatttttgagcattaatttgc

SEQ ID NO: 24264 - DNA, 40 bp, Artificial Sequence
  Description of Artificial Sequence: Synthetic primer
gtatttttgcagctcttcaaatgtaccgacagtttggttg

SEQ ID NO: 24265 - DNA, 40 bp, Artificial Sequence
  Description of Artificial Sequence: Synthetic primer
tgcatgtgatgcgggtgctgaacgacaggaactttattag

SEQ ID NO: 24266 - DNA, 40 bp, Artificial Sequence
  Description of Artificial Sequence: Synthetic primer
ccaccactaaggtttttgatcatgagattagtcaagttcc

SEQ ID NO: 24267 - DNA, 40 bp, Artificial Sequence
  Description of Artificial Sequence: Synthetic primer
acatagacagcttttattgacttccatatgtaacaatacc

SEQ ID NO: 24268 - DNA, 40 bp, Artificial Sequence
  Description of Artificial Sequence: Synthetic primer
ctctcgggacctcttggagatcagaatgaacccgttgttg

SEQ ID NO: 24269 - DNA, 40 bp, Artificial Sequence
  Description of Artificial Sequence: Synthetic primer
cggctcagtttctcataattcatcttaggtttgtttttcc

SEQ ID NO: 24270 - DNA, 40 bp, Artificial Sequence
  Description of Artificial Sequence: Synthetic primer
agggttataatcgccttcattttcagagccagatgctttc

SEQ ID NO: 24271 - DNA, 40 bp, Artificial Sequence
  Description of Artificial Sequence: Synthetic primer
ttacagattatttaaaacagtatcagttttctattccttc

SEQ ID NO: 24272 - DNA, 40 bp, Artificial Sequence
  Description of Artificial Sequence: Synthetic primer
gtggatcacctgaaaatgctgcatacggcaggagggaaag

SEQ ID NO: 24273 - DNA, 40 bp, Artificial Sequence
  Description of Artificial Sequence: Synthetic primer
tgttcaatccttgtgggtattcgatgaatggaatgaaatc

SEQ ID NO: 24274 - DNA, 40 bp, Artificial Sequence
  Description of Artificial Sequence: Synthetic primer
gcagccgaataatccacttgccaccatttttatttgcatc

SEQ ID NO: 24275 - DNA, 40 bp, Artificial Sequence
  Description of Artificial Sequence: Synthetic primer
ggaatctggagaggaggtagaaattgaggaattctatgtg

SEQ ID NO: 24276 - DNA, 40 bp, Artificial Sequence
  Description of Artificial Sequence: Synthetic primer
aaatatgaagcttctttgtgtggactgaaggggtgttagc

SEQ ID NO: 24277 - DNA, 40 bp, Artificial Sequence
  Description of Artificial Sequence: Synthetic primer
gtgaaacaaaatgggttttcattgtttattggtatttttg

SEQ ID NO: 24278 - DNA, 40 bp, Artificial Sequence
  Description of Artificial Sequence: Synthetic primer
gctgcgatcccgttctgctgcccgtaataaaaatgctctc

SEQ ID NO: 24279 - DNA, 40 bp, Artificial Sequence
  Description of Artificial Sequence: Synthetic primer
cgcggcgccgcagctggacgcccctcccgggctcactttg

SEQ ID NO: 24280 - DNA, 40 bp, Artificial Sequence
  Description of Artificial Sequence: Synthetic primer
tatgtaaaactgtttaattcacgtttgggaatattgaatg

SEQ ID NO: 24281 - DNA, 40 bp, Artificial Sequence
  Description of Artificial Sequence: Synthetic primer
caagttttgaggaagcagtcaaaggaaaagggaagttaag

SEQ ID NO: 24282 - DNA, 40 bp, Artificial Sequence
  Description of Artificial Sequence: Synthetic primer
tataactacacgctgtgtcggaacggggtgaaagagaagc

SEQ ID NO: 24283 - DNA, 40 bp, Artificial Sequence
  Description of Artificial Sequence: Synthetic primer
tctcctgcaagctttgagcaaagagagggaaaacaaaatg

SEQ ID NO: 24284 - DNA, 40 bp, Artificial Sequence
  Description of Artificial Sequence: Synthetic primer
ggcctcaggagacttatttgtcttaggggcttcaacagag

SEQ ID NO: 24285 - DNA, 40 bp, Artificial Sequence
  Description of Artificial Sequence: Synthetic primer
tctacaacacaggcccaggcccaaccccagccagccaacg

SEQ ID NO: 24286 - DNA, 40 bp, Artificial Sequence
  Description of Artificial Sequence: Synthetic primer
tcaccaagggtacccacaccggaatttccaggaagaaata

SEQ ID NO: 24287 - DNA, 40 bp, Artificial Sequence
  Description of Artificial Sequence: Synthetic primer
ccagaacccgacggccctgccccagcctttctccggcaag

SEQ ID NO: 24288 - DNA, 40 bp, Artificial Sequence
  Description of Artificial Sequence: Synthetic primer
ccgcctggtgcacctgcagacgctcgtgctcaatggaaac

SEQ ID NO: 24289 - DNA, 40 bp, Artificial Sequence
  Description of Artificial Sequence: Synthetic primer
tttgccttcctttctccaggaccaataaaatttctaagag

SEQ ID NO: 24290 - DNA, 40 bp, Artificial Sequence
  Description of Artificial Sequence: Synthetic primer
tgtgatgtcgccgtccccagtgtaggtgaagttgtacagg

SEQ ID NO: 24291 - DNA, 40 bp, Artificial Sequence
  Description of Artificial Sequence: Synthetic primer
ctcgaatgttctctttcagacccaaatattcgacttgatg

SEQ ID NO: 24292 - DNA, 40 bp, Artificial Sequence
  Description of Artificial Sequence: Synthetic primer
tcacctaataggtcaaagatacatgaagagcttggctgag

SEQ ID NO: 24293 - DNA, 40 bp, Artificial Sequence
  Description of Artificial Sequence: Synthetic primer
atgcggtcagcaaaagacacttctctcccaatgaggtaag

SEQ ID NO: 24294 - DNA, 40 bp, Artificial Sequence
  Description of Artificial Sequence: Synthetic primer
ctacatgtaggaatagagtcttcgatgagtgctgaaaatg

SEQ ID NO: 24295 - DNA, 40 bp, Artificial Sequence
  Description of Artificial Sequence: Synthetic primer
tcaaaaatttactgttcccttctccatcatcatcaaaatc

SEQ ID NO: 24296 - DNA, 40 bp, Artificial Sequence
  Description of Artificial Sequence: Synthetic primer
ctatgagtggaaagggaagatcgaggaagacagtgaggtg

SEQ ID NO: 24297 - DNA, 40 bp, Artificial Sequence
  Description of Artificial Sequence: Synthetic primer
ctggctgagcttccggtggtctgggtcaatatctgtgatg

SEQ ID NO: 24298 - DNA, 40 bp, Artificial Sequence
  Description of Artificial Sequence: Synthetic primer
cccctgggttcctttgtgctgctgtgtgcctcctctcctg

SEQ ID NO: 24299 - DNA, 40 bp, Artificial Sequence
  Description of Artificial Sequence: Synthetic primer
ccaggactgcagagtcccccgcaggaggaatccagtagac

SEQ ID NO: 24300 - DNA, 40 bp, Artificial Sequence
  Description of Artificial Sequence: Synthetic primer
aatgacgtggagagtattcaatgtcacagaatcccagatg

SEQ ID NO: 24301 - DNA, 40 bp, Artificial Sequence
  Description of Artificial Sequence: Synthetic primer
tctgcagggcgactgcaccaaagcgaaacagaagctgaac

SEQ ID NO: 24302 - DNA, 40 bp, Artificial Sequence
  Description of Artificial Sequence: Synthetic primer
tatgaaaaataacaggctcaaaggccatggtactcataat

SEQ ID NO: 24303 - DNA, 40 bp, Artificial Sequence
  Description of Artificial Sequence: Synthetic primer
tgaatcgagtgaaattacacaaaggagcgccgcggaggag

SEQ ID NO: 24304 - DNA, 40 bp, Artificial Sequence
  Description of Artificial Sequence: Synthetic primer
ggggcaatagagtttacagtggcaactgatgaaggtacag

SEQ ID NO: 24305 - DNA, 40 bp, Artificial Sequence
  Description of Artificial Sequence: Synthetic primer
ctgagtgcagacccatctcttgatgggcttccggcagcag

SEQ ID NO: 24306 - DNA, 40 bp, Artificial Sequence
  Description of Artificial Sequence: Synthetic primer
gactgctatttaagagcagggaggtgagtatgcttcttgg

SEQ ID NO: 24307 - DNA, 40 bp, Artificial Sequence
  Description of Artificial Sequence: Synthetic primer
acttcactccactcaccattctggttgtaaccaaggactc

SEQ ID NO: 24308 - DNA, 40 bp, Artificial Sequence
  Description of Artificial Sequence: Synthetic primer
gggggacctggggactcgggtgctgggagtgtggctcctg

SEQ ID NO: 24309 - DNA, 40 bp, Artificial Sequence
  Description of Artificial Sequence: Synthetic primer
ctgtattaaaagttatatttctagcaaacctgataattgc

SEQ ID NO: 24310 - DNA, 40 bp, Artificial Sequence
  Description of Artificial Sequence: Synthetic primer
aatgatctcacatcagcccggccactcagctgtgattctg

SEQ ID NO: 24311 - DNA, 40 bp, Artificial Sequence
  Description of Artificial Sequence: Synthetic primer
tcactgtatgtactaggaactggtttccttgacattctag

SEQ ID NO: 24312 - DNA, 40 bp, Artificial Sequence
  Description of Artificial Sequence: Synthetic primer
gatggaaggctccgtgctttcagtccctcccaattaaaac

SEQ ID NO: 24313 - DNA, 40 bp, Artificial Sequence
  Description of Artificial Sequence: Synthetic primer
agagcctcagagagcggattctcccttggagcaaccagag

SEQ ID NO: 24314 - DNA, 40 bp, Artificial Sequence
  Description of Artificial Sequence: Synthetic primer
tacagcgtaaagaaaccactgcttttgaagaacaggcatc

SEQ ID NO: 24315 - DNA, 40 bp, Artificial Sequence
  Description of Artificial Sequence: Synthetic primer
tctatatatatggcgttagtgacaacgggaggaagtacac

SEQ ID NO: 24316 - DNA, 40 bp, Artificial Sequence
  Description of Artificial Sequence: Synthetic primer
acaggaacttcaactgttgtgagaaatgtttatttttgtg

SEQ ID NO: 24317 - DNA, 40 bp, Artificial Sequence
  Description of Artificial Sequence: Synthetic primer
gtttaattaatcaaaccttatcattcaatggaacatcacc

SEQ ID NO: 24318 - DNA, 40 bp, Artificial Sequence
  Description of Artificial Sequence: Synthetic primer
tccgaatcagtctgttgtatgcaattccaataagttcttc

SEQ ID NO: 24319 - DNA, 40 bp, Artificial Sequence
  Description of Artificial Sequence: Synthetic primer
atcgctgtatcaatgacccttacctggaagttttggagac

SEQ ID NO: 24320 - DNA, 40 bp, Artificial Sequence
  Description of Artificial Sequence: Synthetic primer
aataattttgcaaccccaatgacaccaggagccaaaacac

SEQ ID NO: 24321 - DNA, 40 bp, Artificial Sequence
  Description of Artificial Sequence: Synthetic primer
agggtaattatccttcttgcccttgaagatctcactagcc

SEQ ID NO: 24322 - DNA, 40 bp, Artificial Sequence
  Description of Artificial Sequence: Synthetic primer
cctcgaatcccaacatctcctctttctcctttctctcctc

SEQ ID NO: 24323 - DNA, 40 bp, Artificial Sequence
  Description of Artificial Sequence: Synthetic primer
agcccgccagacccagcaacttcctctcagcatcttctcc

SEQ ID NO: 24324 - DNA, 40 bp, Artificial Sequence
  Description of Artificial Sequence: Synthetic primer
agaggggacagagccagctctctaacccaacagatgacag

SEQ ID NO: 24325 - DNA, 40 bp, Artificial Sequence
  Description of Artificial Sequence: Synthetic primer
ctcaaataaaaatctgtatatgaatacattttccctaagc

SEQ ID NO: 24326 - DNA, 40 bp, Artificial Sequence
  Description of Artificial Sequence: Synthetic primer
gtcgcccaactgggcgctgaacaccgactcaaagtactcg

SEQ ID NO: 24327 - DNA, 40 bp, Artificial Sequence
  Description of Artificial Sequence: Synthetic primer
gttcctcaacatcaacgagcttgatatgattgcagggaag

SEQ ID NO: 24328 - DNA, 40 bp, Artificial Sequence
  Description of Artificial Sequence: Synthetic primer
tgggacaatgaatactgcagcaatgagtgtgtggtgaagc

SEQ ID NO: 24329 - DNA, 40 bp, Artificial Sequence
  Description of Artificial Sequence: Synthetic primer
tcatttattccattcttcagatttcccagcctttctgttg

SEQ ID NO: 24330 - DNA, 40 bp, Artificial Sequence
  Description of Artificial Sequence: Synthetic primer
ttgatagagaagatgaagacccagaatataaaccaaccag

SEQ ID NO: 24331 - DNA, 40 bp, Artificial Sequence
  Description of Artificial Sequence: Synthetic primer
ttttttatacttggcgttttttgaataaaaaccttttgtc

SEQ ID NO: 24332 - DNA, 40 bp, Artificial Sequence
  Description of Artificial Sequence: Synthetic primer
gcggcccctggcgtgagccccaagctccacgacctttctc

SEQ ID NO: 24333 - DNA, 40 bp, Artificial Sequence
  Description of Artificial Sequence: Synthetic primer
agaaatacacagtttaaagaaaactcccagtggttcaaac

SEQ ID NO: 24334 - DNA, 40 bp, Artificial Sequence
  Description of Artificial Sequence: Synthetic primer
ttttgaggaccaatgcttaaggtggactttgttcgtaaac

SEQ ID NO: 24335 - DNA, 40 bp, Artificial Sequence
  Description of Artificial Sequence: Synthetic primer
tgtgaaaatattttagcatcatttaaccacacattgtaac

SEQ ID NO: 24336 - DNA, 40 bp, Artificial Sequence
  Description of Artificial Sequence: Synthetic primer
tgagcgctgccagccggggtaccagcacgcccaggatctc

SEQ ID NO: 24337 - DNA, 40 bp, Artificial Sequence
  Description of Artificial Sequence: Synthetic primer
atgtaagatggcaactgtattaaagaaaaatccggaaaac

SEQ ID NO: 24338 - DNA, 40 bp, Artificial Sequence
  Description of Artificial Sequence: Synthetic primer
cttcctcaatcggaaacacgagtgggaggcccacaataag

SEQ ID NO: 24339 - DNA, 40 bp, Artificial Sequence
  Description of Artificial Sequence: Synthetic primer
cattaaatagggactggggtcccttcttaccagctgtctg

SEQ ID NO: 24340 - DNA, 40 bp, Artificial Sequence
  Description of Artificial Sequence: Synthetic primer
tggtcttgtaatgcactggtaaaaacaaaataaatagatg

SEQ ID NO: 24341 - DNA, 40 bp, Artificial Sequence
  Description of Artificial Sequence: Synthetic primer
gcagtggctcaacaacatgcagatcccagagaagctggag

SEQ ID NO: 24342 - DNA, 40 bp, Artificial Sequence
  Description of Artificial Sequence: Synthetic primer
gctgggctgggcagggcaacgcgcccccggggaggggcgg

SEQ ID NO: 24343 - DNA, 40 bp, Artificial Sequence
  Description of Artificial Sequence: Synthetic primer
gaatttacctgaagataaattaaccaagatcattgactgc

SEQ ID NO: 24344 - DNA, 40 bp, Artificial Sequence
  Description of Artificial Sequence: Synthetic primer
ggcaggccagggaaatggaggaactcgggccaagtgtgtg

SEQ ID NO: 24345 - DNA, 40 bp, Artificial Sequence
  Description of Artificial Sequence: Synthetic primer
ctgagtgagcttccctcaaagtctgtggtctctttccaac

SEQ ID NO: 24346 - DNA, 40 bp, Artificial Sequence
  Description of Artificial Sequence: Synthetic primer
ccgccgctgagtccgcccccgagagcgaagcgggacttgc

SEQ ID NO: 24347 - DNA, 40 bp, Artificial Sequence
  Description of Artificial Sequence: Synthetic primer
aattcccgtatggcatgtattcagtcacaatgtaaaatgg

SEQ ID NO: 24348 - DNA, 40 bp, Artificial Sequence
  Description of Artificial Sequence: Synthetic primer
cctcggccacactggcgtctcttgagaactgatggacctc

SEQ ID NO: 24349 - DNA, 40 bp, Artificial Sequence
  Description of Artificial Sequence: Synthetic primer
tggcatgtcattaggaatgtttaatgcccctgattttatc

SEQ ID NO: 24350 - DNA, 40 bp, Artificial Sequence
  Description of Artificial Sequence: Synthetic primer
ggatcacaaaaccttctgtgcaaactacgcatctttttct

SEQ ID NO: 24351 - DNA, 40 bp, Artificial Sequence
  Description of Artificial Sequence: Synthetic primer
agtttgaacatttccgtcagtttcttgagactcattcttc

SEQ ID NO: 24352 - DNA, 40 bp, Artificial Sequence
  Description of Artificial Sequence: Synthetic primer
ttggaagtttgtctagattcgttccttctagattcatttc

SEQ ID NO: 24353 - DNA, 40 bp, Artificial Sequence
  Description of Artificial Sequence: Synthetic primer
ttgaatagtgtatttctagaagccaaatattgaataaatc

SEQ ID NO: 24354 - DNA, 40 bp, Artificial Sequence
  Description of Artificial Sequence: Synthetic primer
aaacaacatattacgtataaattttgaagaattggaataa

SEQ ID NO: 24355 - DNA, 40 bp, Artificial Sequence
  Description of Artificial Sequence: Synthetic primer
gcactggttcccctgttgaagcttgctagggattacagtg

SEQ ID NO: 24356 - DNA, 40 bp, Artificial Sequence
  Description of Artificial Sequence: Synthetic primer
tgtaccttctgctggaacagatagtaaaacatgtaatttg

SEQ ID NO: 24357 - DNA, 40 bp, Artificial Sequence
  Description of Artificial Sequence: Synthetic primer
tagactggtgcccatttgaagttttagaaggattatatct

SEQ ID NO: 24358 - DNA, 40 bp, Artificial Sequence
  Description of Artificial Sequence: Synthetic primer
ccttcctcaacaggaggaaaattcctggtacagtttaacg

SEQ ID NO: 24359 - DNA, 40 bp, Artificial Sequence
  Description of Artificial Sequence: Synthetic primer
gccgggtttccggaagctcgcagcttggcctgcaccacac

SEQ ID NO: 24360 - DNA, 40 bp, Artificial Sequence
  Description of Artificial Sequence: Synthetic primer
gagcaggtgtgaggagctccacgggaagaacctggaactg

SEQ ID NO: 24361 - DNA, 40 bp, Artificial Sequence
  Description of Artificial Sequence: Synthetic primer
atgtggcaataaatgaactgaatataaaattgcaagatac

SEQ ID NO: 24362 - DNA, 40 bp, Artificial Sequence
  Description of Artificial Sequence: Synthetic primer
ccctccttgctaactttgccacccttgtcagcacctacgc

SEQ ID NO: 24363 - DNA, 40 bp, Artificial Sequence
  Description of Artificial Sequence: Synthetic primer
agctcttccatcatcttttgagtggtcagtttctctttag

SEQ ID NO: 24364 - DNA, 40 bp, Artificial Sequence
  Description of Artificial Sequence: Synthetic primer
ggctcagctgccactaaagagctttttggataaaattgag

SEQ ID NO: 24365 - DNA, 40 bp, Artificial Sequence
  Description of Artificial Sequence: Synthetic primer
ttccaaatgatttgttaaacatcttcaaaatgagtctttg

SEQ ID NO: 24366 - DNA, 40 bp, Artificial Sequence
  Description of Artificial Sequence: Synthetic primer
ctcttcttctgagaaatcaaatgtgtatttaggtctttcg

SEQ ID NO: 24367 - DNA, 40 bp, Artificial Sequence
  Description of Artificial Sequence: Synthetic primer
agtcaatccatatggcatttttggctgcttgttcttttcc

SEQ ID NO: 24368 - DNA, 40 bp, Artificial Sequence
  Description of Artificial Sequence: Synthetic primer
tcatagagatttcaagtacccacaagaaactcaacgagag

SEQ ID NO: 24369 - DNA, 40 bp, Artificial Sequence
  Description of Artificial Sequence: Synthetic primer
atccttatagatcttctctcctattacatccacaatcttc

SEQ ID NO: 24370 - DNA, 40 bp, Artificial Sequence
  Description of Artificial Sequence: Synthetic primer
ccttgttctcctatcagccctggaggaccagcaggaccag

SEQ ID NO: 24371 - DNA, 40 bp, Artificial Sequence
  Description of Artificial Sequence: Synthetic primer
tataaaactgaatttgatgtaacgtgggacggacaacttc

SEQ ID NO: 24372 - DNA, 40 bp, Artificial Sequence
  Description of Artificial Sequence: Synthetic primer
catcaagtaactgctgccaattctgcaacaactcaggttc

SEQ ID NO: 24373 - DNA, 40 bp, Artificial Sequence
  Description of Artificial Sequence: Synthetic primer
tctggactgcttcgtcatcgacaacaacgggttcattctg

SEQ ID NO: 24374 - DNA, 40 bp, Artificial Sequence
  Description of Artificial Sequence: Synthetic primer
caaatgaatgttcagttcatgaagctactccaccctctgg

SEQ ID NO: 24375 - DNA, 40 bp, Artificial Sequence
  Description of Artificial Sequence: Synthetic primer
ccgccccatgtagtcaaacttggcaatagcctcgatctgc

SEQ ID NO: 24376 - DNA, 40 bp, Artificial Sequence
  Description of Artificial Sequence: Synthetic primer
tcagaaaataagatcttcagagcagtgcccaaaccctgag

SEQ ID NO: 24377 - DNA, 40 bp, Artificial Sequence
  Description of Artificial Sequence: Synthetic primer
ttgccgctgattttgtcaaatctataaaagccagagacag

SEQ ID NO: 24378 - DNA, 40 bp, Artificial Sequence
  Description of Artificial Sequence: Synthetic primer
atttactttgtactcaaataaaatcccctattgcaaatcc

SEQ ID NO: 24379 - DNA, 40 bp, Artificial Sequence
  Description of Artificial Sequence: Synthetic primer
gcaccatcttgcctaatggactagattggactgtatcaac

SEQ ID NO: 24380 - DNA, 40 bp, Artificial Sequence
  Description of Artificial Sequence: Synthetic primer
ggaacatttcaatctctgtatgagtccgggcctcttcttc

SEQ ID NO: 24381 - DNA, 40 bp, Artificial Sequence
  Description of Artificial Sequence: Synthetic primer
gtgggaaagattgagttgagtgctgcccacttgaaaaagg

SEQ ID NO: 24382 - DNA, 40 bp, Artificial Sequence
  Description of Artificial Sequence: Synthetic primer
tcctgctgtcagccaggcggaaggcaggtgttgcctcaag

SEQ ID NO: 24383 - DNA, 40 bp, Artificial Sequence
  Description of Artificial Sequence: Synthetic primer
caccctggagtccctgaagcggtatctcggtgagatggag

SEQ ID NO: 24384 - DNA, 40 bp, Artificial Sequence
  Description of Artificial Sequence: Synthetic primer
cacagttgactggattgtttttaaagatacagttagcatc

SEQ ID NO: 24385 - DNA, 40 bp, Artificial Sequence
  Description of Artificial Sequence: Synthetic primer
atgggtggggctgcagatcagagtggggtcatattcatcc

SEQ ID NO: 24386 - DNA, 40 bp, Artificial Sequence
  Description of Artificial Sequence: Synthetic primer
tttgctgcagaaatatatcagtggcccacattaaacatac

SEQ ID NO: 24387 - DNA, 40 bp, Artificial Sequence
  Description of Artificial Sequence: Synthetic primer
gtgtggccacctacccaggtgtccctcccttttgttttgg

SEQ ID NO: 24388 - DNA, 40 bp, Artificial Sequence
  Description of Artificial Sequence: Synthetic primer
gcccggggttacccctcaaccgtatttggggctgctcctg

SEQ ID NO: 24389 - DNA, 40 bp, Artificial Sequence
  Description of Artificial Sequence: Synthetic primer
acgctgaagctggtggagcggctgggggctggacagttcg

SEQ ID NO: 24390 - DNA, 40 bp, Artificial Sequence
  Description of Artificial Sequence: Synthetic primer
tgaatgtttatatgttaactttgactttgatggggctcag

SEQ ID NO: 24391 - DNA, 40 bp, Artificial Sequence
  Description of Artificial Sequence: Synthetic primer
atcgagagagtacctgtttccctattgatcatggctgttc

SEQ ID NO: 24392 - DNA, 40 bp, Artificial Sequence
  Description of Artificial Sequence: Synthetic primer
tcaccagcctactgcagaagtgcagggcaccagtaaacac

SEQ ID NO: 24393 - DNA, 40 bp, Artificial Sequence
  Description of Artificial Sequence: Synthetic primer
ctggcttctctttcagctggggatcgaagagtcgtaactg

SEQ ID NO: 24394 - DNA, 40 bp, Artificial Sequence
  Description of Artificial Sequence: Synthetic primer
ttggagtttccccagtttgaaacccttcatctaggatatg

SEQ ID NO: 24395 - DNA, 40 bp, Artificial Sequence
  Description of Artificial Sequence: Synthetic primer
atgctctgtgtaaatcagccagatctccgtctgctccatc

SEQ ID NO: 24396 - DNA, 40 bp, Artificial Sequence
  Description of Artificial Sequence: Synthetic primer
gcggggccaccgatgagggaggtggcagaggcagcagcag

SEQ ID NO: 24397 - DNA, 40 bp, Artificial Sequence
  Description of Artificial Sequence: Synthetic primer
gaatccagtttctttcttaaagatttctttctcttttgtc

SEQ ID NO: 24398 - DNA, 40 bp, Artificial Sequence
  Description of Artificial Sequence: Synthetic primer
aggttcctcttcatcttcactattgtcactgctttgtagg

SEQ ID NO: 24399 - DNA, 40 bp, Artificial Sequence
  Description of Artificial Sequence: Synthetic primer
cctgttaaagcctcatttttcttttgcccttttgttcttc

SEQ ID NO: 24400 - DNA, 40 bp, Artificial Sequence
  Description of Artificial Sequence: Synthetic primer
gaactcggagttgaggaggctggagtcggtgttgatctgg

SEQ ID NO: 24401 - DNA, 40 bp, Artificial Sequence
  Description of Artificial Sequence: Synthetic primer
gatgaactcctgtcctttaattcttatcaagtactcacac

SEQ ID NO: 24402 - DNA, 40 bp, Artificial Sequence
  Description of Artificial Sequence: Synthetic primer
acctttgtcattagagcacagtactgccaaataaagaatg

SEQ ID NO: 24403 - DNA, 40 bp, Artificial Sequence
  Description of Artificial Sequence: Synthetic primer
ccttcccataggcgccctccccgatctccgccacgcattc

SEQ ID NO: 24404 - DNA, 40 bp, Artificial Sequence
  Description of Artificial Sequence: Synthetic primer
gatgcagcggaccagctccatggggcagcggtcatacgtg

SEQ ID NO: 24405 - DNA, 40 bp, Artificial Sequence
  Description of Artificial Sequence: Synthetic primer
ctgttgtagttaggtttgggttttagtttcttcccctctc

SEQ ID NO: 24406 - DNA, 40 bp, Artificial Sequence
  Description of Artificial Sequence: Synthetic primer
aaagtagcctttgtttgaggcattcttctcttgccacttg

SEQ ID NO: 24407 - DNA, 40 bp, Artificial Sequence
  Description of Artificial Sequence: Synthetic primer
aacctggcatgacacctgacagggtaaatgacagacaaat

SEQ ID NO: 24408 - DNA, 40 bp, Artificial Sequence
  Description of Artificial Sequence: Synthetic primer
gcgctctgcccttctcttcctacagcctggtctcctttgg

SEQ ID NO: 24409 - DNA, 40 bp, Artificial Sequence
  Description of Artificial Sequence: Synthetic primer
cttgaaaataaaatctcatcactccatggaactccaaatc

SEQ ID NO: 24410 - DNA, 40 bp, Artificial Sequence
  Description of Artificial Sequence: Synthetic primer
gcgagtgcttaacctacctcccaacaccattatggaatac

SEQ ID NO: 24411 - DNA, 40 bp, Artificial Sequence
  Description of Artificial Sequence: Synthetic primer
gccgaggccccgagccaggggtggagccacaggacagcag

SEQ ID NO: 24412 - DNA, 40 bp, Artificial Sequence
  Description of Artificial Sequence: Synthetic primer
tgtcgcgggggccctgagaaagtccggagactacagcttc

SEQ ID NO: 24413 - DNA, 40 bp, Artificial Sequence
  Description of Artificial Sequence: Synthetic primer
actaggaccagatggaccagcagtgcccacagcaccaacc

SEQ ID NO: 24414 - DNA, 40 bp, Artificial Sequence
  Description of Artificial Sequence: Synthetic primer
attgtttcttgcaagtgaacagtttgcagcacgtcagaag

SEQ ID NO: 24415 - DNA, 40 bp, Artificial Sequence
  Description of Artificial Sequence: Synthetic primer
tgccatggttggcatcaaaagatcacctagaccatcaaac

SEQ ID NO: 24416 - DNA, 40 bp, Artificial Sequence
  Description of Artificial Sequence: Synthetic primer
atcggatcacgatagcaacaggacaagttgcgggcacatc

SEQ ID NO: 24417 - DNA, 40 bp, Artificial Sequence
  Description of Artificial Sequence: Synthetic primer
gaggagccgttcgaactgtctcaccacttccctgcagctc

SEQ ID NO: 24418 - DNA, 40 bp, Artificial Sequence
  Description of Artificial Sequence: Synthetic primer
cccacctagaccagcctttgttgggggactagggataaag

SEQ ID NO: 24419 - DNA, 40 bp, Artificial Sequence
  Description of Artificial Sequence: Synthetic primer
ctgccttattcgcctggctagctcccacacaaaaagtcag

SEQ ID NO: 24420 - DNA, 40 bp, Artificial Sequence
  Description of Artificial Sequence: Synthetic primer
agggggaaatggctgagtggcggaagcaaagtagggttag

SEQ ID NO: 24421 - DNA, 40 bp, Artificial Sequence
  Description of Artificial Sequence: Synthetic primer
aaaacttcagtattcactggattatgatttccaaaataac

SEQ ID NO: 24422 - DNA, 40 bp, Artificial Sequence
  Description of Artificial Sequence: Synthetic primer
tgtaaagctacttgctatagcccatatattcagtttgttc

SEQ ID NO: 24423 - DNA, 40 bp, Artificial Sequence
  Description of Artificial Sequence: Synthetic primer
cttccaattatttctccaaatcatgtaatgttagccaagg

SEQ ID NO: 24424 - DNA, 40 bp, Artificial Sequence
  Description of Artificial Sequence: Synthetic primer
ccagctgctggccatcctggacttcaacaacatccgcaag

SEQ ID NO: 24425 - DNA, 40 bp, Artificial Sequence
  Description of Artificial Sequence: Synthetic primer
tgtcctgctgtccgctgacctgaaggggttccagtacttc

SEQ ID NO: 24426 - DNA, 40 bp, Artificial Sequence
  Description of Artificial Sequence: Synthetic primer
ggccactacctcctttcctatctttacatctatgtgtatg

SEQ ID NO: 24427 - DNA, 40 bp, Artificial Sequence
  Description of Artificial Sequence: Synthetic primer
tggaggacctccgctgcaaatacatctccctcatctacac

SEQ ID NO: 24428 - DNA, 40 bp, Artificial Sequence
  Description of Artificial Sequence: Synthetic primer
tcctcgcggagctaaggtggactctcttgcagccaacttc

SEQ ID NO: 24429 - DNA, 40 bp, Artificial Sequence
  Description of Artificial Sequence: Synthetic primer
tcctggtttgatacaaacaactgccttggggatcaaaaac

SEQ ID NO: 24430 - DNA, 40 bp, Artificial Sequence
  Description of Artificial Sequence: Synthetic primer
ggcattcaggcctcagtgaagacggcccgagaactcacac

SEQ ID NO: 24431 - DNA, 40 bp, Artificial Sequence
  Description of Artificial Sequence: Synthetic primer
ggaacatcaactcagatcgcatccaggagaaggtggactc

SEQ ID NO: 24432 - DNA, 40 bp, Artificial Sequence
  Description of Artificial Sequence: Synthetic primer
tcctctcttccggaatccgatgtcagaccctaagaagaag

SEQ ID NO: 24433 - DNA, 40 bp, Artificial Sequence
  Description of Artificial Sequence: Synthetic primer
tgttctcagagaaatatcattgaggtgggggcagctcttc

SEQ ID NO: 24434 - DNA, 40 bp, Artificial Sequence
  Description of Artificial Sequence: Synthetic primer
aaaaattaaacgatttaaggcaaagcagggccagaacaag

SEQ ID NO: 24435 - DNA, 40 bp, Artificial Sequence
  Description of Artificial Sequence: Synthetic primer
taaggttctatcttgtgccatgatgaataaaaagttaagc

SEQ ID NO: 24436 - DNA, 40 bp, Artificial Sequence
  Description of Artificial Sequence: Synthetic primer
aggaatctcttgttggcatttgaagcggctgaaagtgtag

SEQ ID NO: 24437 - DNA, 40 bp, Artificial Sequence
  Description of Artificial Sequence: Synthetic primer
cagtgcaggttgcccttaattttccccaaacccctccatc

SEQ ID NO: 24438 - DNA, 40 bp, Artificial Sequence
  Description of Artificial Sequence: Synthetic primer
gtcctctggagtatgaaacctttagagtcacaataaaatg

SEQ ID NO: 24439 - DNA, 40 bp, Artificial Sequence
  Description of Artificial Sequence: Synthetic primer
tataccatacaactgttttgaaaatccagcgtggacaatg

SEQ ID NO: 24440 - DNA, 40 bp, Artificial Sequence
  Description of Artificial Sequence: Synthetic primer
ggaggcctctcatttttagttaatcacgatttctctcctc

SEQ ID NO: 24441 - DNA, 40 bp, Artificial Sequence
  Description of Artificial Sequence: Synthetic primer
atagctaaaacgcagcagcatttattttgcctcattagag

SEQ ID NO: 24442 - DNA, 40 bp, Artificial Sequence
  Description of Artificial Sequence: Synthetic primer
cgcacaccttaggggccctgatgtgcctggctgttaacac

SEQ ID NO: 24443 - DNA, 40 bp, Artificial Sequence
  Description of Artificial Sequence: Synthetic primer
ccatgacgcagcagttgttcaagatctcgccactgtaatc

SEQ ID NO: 24444 - DNA, 40 bp, Artificial Sequence
  Description of Artificial Sequence: Synthetic primer
tagattctggtgttaaaatagactggatctgtattatctg

SEQ ID NO: 24445 - DNA, 40 bp, Artificial Sequence
  Description of Artificial Sequence: Synthetic primer
cacgcccaggaacgccgggggaccgcacgtgctgctgcgg

SEQ ID NO: 24446 - DNA, 40 bp, Artificial Sequence
  Description of Artificial Sequence: Synthetic primer
gtggagataaagcttctggatttcactatggagttcatgc

SEQ ID NO: 24447 - DNA, 40 bp, Artificial Sequence
  Description of Artificial Sequence: Synthetic primer
taaagtaaaacaaacctatcttggttaacatgaaaataac

SEQ ID NO: 24448 - DNA, 40 bp, Artificial Sequence
  Description of Artificial Sequence: Synthetic primer
ttccaccactgaggtgtcgtccaggtcccgaaggatgtag

SEQ ID NO: 24449 - DNA, 40 bp, Artificial Sequence
  Description of Artificial Sequence: Synthetic primer
gctcagtatgatggaaaaggagttggacttggccctggac

SEQ ID NO: 24450 - DNA, 40 bp, Artificial Sequence
  Description of Artificial Sequence: Synthetic primer
ctgggtgcttagaatgtttaggtttcactgaaccatttcc

SEQ ID NO: 24451 - DNA, 40 bp, Artificial Sequence
  Description of Artificial Sequence: Synthetic primer
cagggatttgccaattccactcattacatatgatgcctac

SEQ ID NO: 24452 - DNA, 40 bp, Artificial Sequence
  Description of Artificial Sequence: Synthetic primer
agcaactactgggaatgttgtttagacagagcaataactg

SEQ ID NO: 24453 - DNA, 40 bp, Artificial Sequence
  Description of Artificial Sequence: Synthetic primer
ctgctaaagagtatgccaatactacagggacaaattgatg

SEQ ID NO: 24454 - DNA, 40 bp, Artificial Sequence
  Description of Artificial Sequence: Synthetic primer
tgcagcagccacctggtcgccgtcaagaaggcagaaattg

SEQ ID NO: 24455 - DNA, 40 bp, Artificial Sequence
  Description of Artificial Sequence: Synthetic primer
tcaaactttcagtctagcccaaaatatggtagtgaagaag

SEQ ID NO: 24456 - DNA, 40 bp, Artificial Sequence
  Description of Artificial Sequence: Synthetic primer
tcaaagatttatgcttacaggtagacattcaatttaccaa

SEQ ID NO: 24457 - DNA, 40 bp, Artificial Sequence
  Description of Artificial Sequence: Synthetic primer
tccatgttttctgtccagaccctattttcttcgcaaatcc

SEQ ID NO: 24458 - DNA, 40 bp, Artificial Sequence
  Description of Artificial Sequence: Synthetic primer
gttcaacggaaacccacataccgagttcctgttaaatacg

SEQ ID NO: 24459 - DNA, 40 bp, Artificial Sequence
  Description of Artificial Sequence: Synthetic primer
gcctgcctggatctctaaatattacccattctgggagttg

SEQ ID NO: 24460 - DNA, 40 bp, Artificial Sequence
  Description of Artificial Sequence: Synthetic primer
aaaggccaggtgtcacccacaccccagcagttccccttag

SEQ ID NO: 24461 - DNA, 40 bp, Artificial Sequence
  Description of Artificial Sequence: Synthetic primer
ttactccacaggaaaatgtaagctactttgtcatagatca

SEQ ID NO: 24462 - DNA, 40 bp, Artificial Sequence
  Description of Artificial Sequence: Synthetic primer
acctttgtgagaaaggcagcctatgccaagcgccatgcag

SEQ ID NO: 24463 - DNA, 40 bp, Artificial Sequence
  Description of Artificial Sequence: Synthetic primer
ggtgtcaccgttttcagagaaagtcacacagaggacaaac

SEQ ID NO: 24464 - DNA, 40 bp, Artificial Sequence
  Description of Artificial Sequence: Synthetic primer
caatgcccacccagaagaagttctcaggctcctcaccttc

SEQ ID NO: 24465 - DNA, 40 bp, Artificial Sequence
  Description of Artificial Sequence: Synthetic primer
tttttcttccagagggataaagttttctataataagatgc

SEQ ID NO: 24466 - DNA, 40 bp, Artificial Sequence
  Description of Artificial Sequence: Synthetic primer
tatatggtttggaaactttcagactcaatagaacaaaaac

SEQ ID NO: 24467 - DNA, 40 bp, Artificial Sequence
  Description of Artificial Sequence: Synthetic primer
tccaaatatggtggctaagtttagagatgtcattttattc

SEQ ID NO: 24468 - DNA, 40 bp, Artificial Sequence
  Description of Artificial Sequence: Synthetic primer
attcaacattaaaaagcggatccaaagacccaggaatgac

SEQ ID NO: 24469 - DNA, 40 bp, Artificial Sequence
  Description of Artificial Sequence: Synthetic primer
ggccatgccgtccctccagctagtggtgaaattgtgaatg

SEQ ID NO: 24470 - DNA, 40 bp, Artificial Sequence
  Description of Artificial Sequence: Synthetic primer
gtatgtgctggagcgtgtgcagcaccgagtcccggaggag

SEQ ID NO: 24471 - DNA, 40 bp, Artificial Sequence
  Description of Artificial Sequence: Synthetic primer
aaaaacggcgggcgcttctgcgacgtgctcttgcgggtag

SEQ ID NO: 24472 - DNA, 40 bp, Artificial Sequence
  Description of Artificial Sequence: Synthetic primer
actgtgtttgacgtcatcacaatggaaggcataaaaagtg

SEQ ID NO: 24473 - DNA, 40 bp, Artificial Sequence
  Description of Artificial Sequence: Synthetic primer
atctctttggagcggggtgtttttccataaaagccccatg

SEQ ID NO: 24474 - DNA, 40 bp, Artificial Sequence
  Description of Artificial Sequence: Synthetic primer
aagccttctatggtgacgttgcaggtattttcctgtttgg

SEQ ID NO: 24475 - DNA, 40 bp, Artificial Sequence
  Description of Artificial Sequence: Synthetic primer
ctgatccaataaagagcatgtctcatctgtttgtctttgg

SEQ ID NO: 24476 - DNA, 40 bp, Artificial Sequence
  Description of Artificial Sequence: Synthetic primer
agcctctatacattcccgcttacataacaaacagaaaaac

SEQ ID NO: 24477 - DNA, 40 bp, Artificial Sequence
  Description of Artificial Sequence: Synthetic primer
gaaaccattgccttaaaatgttgcatttgtcttttattgc

SEQ ID NO: 24478 - DNA, 40 bp, Artificial Sequence
  Description of Artificial Sequence: Synthetic primer
ttgcaatattgatgtaaaatacatgacatgctagtacatg

SEQ ID NO: 24479 - DNA, 40 bp, Artificial Sequence
  Description of Artificial Sequence: Synthetic primer
gggcaaggccttcctccgcttccgctgcacctcttccttg

SEQ ID NO: 24480 - DNA, 40 bp, Artificial Sequence
  Description of Artificial Sequence: Synthetic primer
catgcaggcatggagccctgcccagaatcaccccatttac

SEQ ID NO: 24481 - DNA, 40 bp, Artificial Sequence
  Description of Artificial Sequence: Synthetic primer
gattctggataggctgggttgactccattaacttgatatg

SEQ ID NO: 24482 - DNA, 40 bp, Artificial Sequence
  Description of Artificial Sequence: Synthetic primer
gaatggctgaagctgcaccctacttacactgttgatatgc

SEQ ID NO: 24483 - DNA, 40 bp, Artificial Sequence
  Description of Artificial Sequence: Synthetic primer
ttcactcaacttctggaagtgggtaagctggatagcactc

SEQ ID NO: 24484 - DNA, 40 bp, Artificial Sequence
  Description of Artificial Sequence: Synthetic primer
actctgaagatcagtagcagcaatcagactccacaaattc

SEQ ID NO: 24485 - DNA, 40 bp, Artificial Sequence
  Description of Artificial Sequence: Synthetic primer
gtagcttcttggaattcagtttctggaactagagatagag

SEQ ID NO: 24486 - DNA, 40 bp, Artificial Sequence
  Description of Artificial Sequence: Synthetic primer
ttcagattctaatatatcctgcactcttctgtttccacac

SEQ ID NO: 24487 - DNA, 40 bp, Artificial Sequence
  Description of Artificial Sequence: Synthetic primer
atggtggagtggagcaaagacctgtatgtgaatcccaacc

SEQ ID NO: 24488 - DNA, 40 bp, Artificial Sequence
  Description of Artificial Sequence: Synthetic primer
gttctcaaggttgttgtgggagaagagaaggctaaaggag

SEQ ID NO: 24489 - DNA, 40 bp, Artificial Sequence
  Description of Artificial Sequence: Synthetic primer
cccctacttgcaaatctgcctggaggttctggtctttagg

SEQ ID NO: 24490 - DNA, 40 bp, Artificial Sequence
  Description of Artificial Sequence: Synthetic primer
ccagatcttggcccaggaagagaactggaagtttgagaag

SEQ ID NO: 24491 - DNA, 40 bp, Artificial Sequence
  Description of Artificial Sequence: Synthetic primer
tgggacattctcccgtcagctccacctgagccaagtgtcc

SEQ ID NO: 24492 - DNA, 40 bp, Artificial Sequence
  Description of Artificial Sequence: Synthetic primer
accatttgcagttgttttcagggccctcagactgatgaag

SEQ ID NO: 24493 - DNA, 40 bp, Artificial Sequence
  Description of Artificial Sequence: Synthetic primer
atcggtcgccgaccactccctgcacctaagcaaagcgaag

SEQ ID NO: 24494 - DNA, 40 bp, Artificial Sequence
  Description of Artificial Sequence: Synthetic primer
aaattaggcaggaaaatcagtctagttctgttatctgttg

SEQ ID NO: 24495 - DNA, 40 bp, Artificial Sequence
  Description of Artificial Sequence: Synthetic primer
agacacaaagttttctagaatgtaacacagccaaatgtag

SEQ ID NO: 24496 - DNA, 40 bp, Artificial Sequence
  Description of Artificial Sequence: Synthetic primer
gctgagggcaacagcaggttcacttacactgttcttgtag

SEQ ID NO: 24497 - DNA, 40 bp, Artificial Sequence
  Description of Artificial Sequence: Synthetic primer
tggcctcgccgtcctctccccgcagccggaccggaactat

SEQ ID NO: 24498 - DNA, 40 bp, Artificial Sequence
  Description of Artificial Sequence: Synthetic primer
catcggtttcttcttcctcttctttgccctcacatttctc

SEQ ID NO: 24499 - DNA, 40 bp, Artificial Sequence
  Description of Artificial Sequence: Synthetic primer
cctgccatggccgagcactcgatatgccagcccggacgac

SEQ ID NO: 24500 - DNA, 40 bp, Artificial Sequence
  Description of Artificial Sequence: Synthetic primer
ctgctcctggagaaactggatccccctcttgggtttcttg

SEQ ID NO: 24501 - DNA, 40 bp, Artificial Sequence
  Description of Artificial Sequence: Synthetic primer
gtgaaaatgcattgccttgtaaagacatgattgcgttgtc

SEQ ID NO: 24502 - DNA, 40 bp, Artificial Sequence
  Description of Artificial Sequence: Synthetic primer
tgatatcattgttggtgttaattgaaagtataatttgctg

SEQ ID NO: 24503 - DNA, 40 bp, Artificial Sequence
  Description of Artificial Sequence: Synthetic primer
gattttttatcacctttattgtaagacagtccatttatga

SEQ ID NO: 24504 - DNA, 40 bp, Artificial Sequence
  Description of Artificial Sequence: Synthetic primer
gagcacttcaacagttggaaccaaggcttcatcattcatc

SEQ ID NO: 24505 - DNA, 40 bp, Artificial Sequence
  Description of Artificial Sequence: Synthetic primer
tttttttaggattattgaaagagtctgggacccttgttgg

SEQ ID NO: 24506 - DNA, 40 bp, Artificial Sequence
  Description of Artificial Sequence: Synthetic primer
ggttggcactatactgagttcctatagagtggtccaagtc

SEQ ID NO: 24507 - DNA, 40 bp, Artificial Sequence
  Description of Artificial Sequence: Synthetic primer
agaattaaaattatattgtagaaggaaacaccaagaaaag

SEQ ID NO: 24508 - DNA, 40 bp, Artificial Sequence
  Description of Artificial Sequence: Synthetic primer
attggtgtagttcttggcatggcgaacaacaatttcaaag

SEQ ID NO: 24509 - DNA, 40 bp, Artificial Sequence
  Description of Artificial Sequence: Synthetic primer
atctttggtgagcatttagaaagggtgtcgtaatctttcc

SEQ ID NO: 24510 - DNA, 40 bp, Artificial Sequence
  Description of Artificial Sequence: Synthetic primer
gaatatgaaggaaatgagaagagatttccaaaatcctgac

SEQ ID NO: 24511 - DNA, 40 bp, Artificial Sequence
  Description of Artificial Sequence: Synthetic primer
accggattttgcagctccagggccccatgcatctctctgg

SEQ ID NO: 24512 - DNA, 40 bp, Artificial Sequence
  Description of Artificial Sequence: Synthetic primer
gcatctttgtagaaacccatttcttggttatttatgacac

SEQ ID NO: 24513 - DNA, 40 bp, Artificial Sequence
  Description of Artificial Sequence: Synthetic primer
tccctgaggcagtggcgacagcggcggcgagaggatgaac

SEQ ID NO: 24514 - DNA, 40 bp, Artificial Sequence
  Description of Artificial Sequence: Synthetic primer
tcatactgttctgcaagtccaacactggcttcccatttac

SEQ ID NO: 24515 - DNA, 40 bp, Artificial Sequence
  Description of Artificial Sequence: Synthetic primer
tgcctggttcttctggagagaaagggaatcctggaagaag

SEQ ID NO: 24516 - DNA, 40 bp, Artificial Sequence
  Description of Artificial Sequence: Synthetic primer
gtgtcgggcactgttcgggcttgaccgacagactttatgg

SEQ ID NO: 24517 - DNA, 40 bp, Artificial Sequence
  Description of Artificial Sequence: Synthetic primer
tccatggagactgcctgcggtgacagcaaagacaatgatg

SEQ ID NO: 24518 - DNA, 40 bp, Artificial Sequence
  Description of Artificial Sequence: Synthetic primer
ctaaacttgacatctttataacatgagccagattgaaagg

SEQ ID NO: 24519 - DNA, 40 bp, Artificial Sequence
  Description of Artificial Sequence: Synthetic primer
gatactgttcttcattcatctgtagggcaagcaaaaagtc

SEQ ID NO: 24520 - DNA, 40 bp, Artificial Sequence
  Description of Artificial Sequence: Synthetic primer
agggggtcctggtgtgcatttgcaccctaaagctgcttac

SEQ ID NO: 24521 - DNA, 40 bp, Artificial Sequence
  Description of Artificial Sequence: Synthetic primer
attccactggggagtaatggctgacttcctgggacacctc

SEQ ID NO: 24522 - DNA, 40 bp, Artificial Sequence
  Description of Artificial Sequence: Synthetic primer
cctccgactgtcagcactgctccacctctgattccaccac

SEQ ID NO: 24523 - DNA, 40 bp, Artificial Sequence
  Description of Artificial Sequence: Synthetic primer
atagacttagaaatatcaaagtaagagctatctggataaa

SEQ ID NO: 24524 - DNA, 40 bp, Artificial Sequence
  Description of Artificial Sequence: Synthetic primer
gcgtccggagccgcgcgtggttctgcaggccgcccggatg

SEQ ID NO: 24525 - DNA, 40 bp, Artificial Sequence
  Description of Artificial Sequence: Synthetic primer
tgcttttcctcttaaggaaggacaggaaatgataggtttc

SEQ ID NO: 24526 - DNA, 40 bp, Artificial Sequence
  Description of Artificial Sequence: Synthetic primer
tgtacccttctgacaaagctgtgtaaagtattagaatctg

SEQ ID NO: 24527 - DNA, 40 bp, Artificial Sequence
  Description of Artificial Sequence: Synthetic primer
agttaaatcaggaaattcagttatttgtgaggcaccattc

SEQ ID NO: 24528 - DNA, 40 bp, Artificial Sequence
  Description of Artificial Sequence: Synthetic primer
tttatctgcagatgatttgcggattaatctttggcatctg

SEQ ID NO: 24529 - DNA, 40 bp, Artificial Sequence
  Description of Artificial Sequence: Synthetic primer
aattgtacttctagggacaattctggtttagcttctacag

SEQ ID NO: 24530 - DNA, 40 bp, Artificial Sequence
  Description of Artificial Sequence: Synthetic primer
agcaggtttcattaaatcctgaaatgttactgatggtctg

SEQ ID NO: 24531 - DNA, 40 bp, Artificial Sequence
  Description of Artificial Sequence: Synthetic primer
tcatcagctctctcagggccacatctgagcccaccacacc

SEQ ID NO: 24532 - DNA, 40 bp, Artificial Sequence
  Description of Artificial Sequence: Synthetic primer
gcaactctcctcagttcagatttgactggtttcttaagtc

SEQ ID NO: 24533 - DNA, 40 bp, Artificial Sequence
  Description of Artificial Sequence: Synthetic primer
ctgccctatggttggaataaggaagggcagagaaaacttg

SEQ ID NO: 24534 - DNA, 40 bp, Artificial Sequence
  Description of Artificial Sequence: Synthetic primer
ggcagctgtctgtgtcttgtctttcaaccatgggcagctc

SEQ ID NO: 24535 - DNA, 40 bp, Artificial Sequence
  Description of Artificial Sequence: Synthetic primer
ggggctggagccctgggaacatggcagtcctggtgataag

SEQ ID NO: 24536 - DNA, 40 bp, Artificial Sequence
  Description of Artificial Sequence: Synthetic primer
cccacattaaagccctcaagtctcttgtctcctttttctg

SEQ ID NO: 24537 - DNA, 40 bp, Artificial Sequence
  Description of Artificial Sequence: Synthetic primer
gtcgactagctgcaaccctgctaggagacataacagatgg

SEQ ID NO: 24538 - DNA, 40 bp, Artificial Sequence
  Description of Artificial Sequence: Synthetic primer
gattgtgggatattaaggaaggctagaatttaagcaactg

SEQ ID NO: 24539 - DNA, 40 bp, Artificial Sequence
  Description of Artificial Sequence: Synthetic primer
atcctgcagaaaagtcacaacactttccatgtaggactgc

SEQ ID NO: 24540 - DNA, 40 bp, Artificial Sequence
  Description of Artificial Sequence: Synthetic primer
tcatgtttgaatgataatttacctgggcataaaattctgg

SEQ ID NO: 24541 - DNA, 40 bp, Artificial Sequence
  Description of Artificial Sequence: Synthetic primer
gtcacggggcccagcggccaggtagggcagggtctcttag

SEQ ID NO: 24542 - DNA, 40 bp, Artificial Sequence
  Description of Artificial Sequence: Synthetic primer
cacctgcggccaggcaggcgggtgtgcggcggacggaagg

SEQ ID NO: 24543 - DNA, 40 bp, Artificial Sequence
  Description of Artificial Sequence: Synthetic primer
aaggttcaacatcaatgaccgcatcaaggagttgggaatg

SEQ ID NO: 24544 - DNA, 40 bp, Artificial Sequence
  Description of Artificial Sequence: Synthetic primer
tgatggtaccttctcggaaggccagagtcaattgtaccac

SEQ ID NO: 24545 - DNA, 40 bp, Artificial Sequence
  Description of Artificial Sequence: Synthetic primer
gctgcatcaaacccaacgagaccaagaggccccgagactg

SEQ ID NO: 24546 - DNA, 40 bp, Artificial Sequence
  Description of Artificial Sequence: Synthetic primer
tccaagaaagagtgcttctctaaatttgcctttttccaac

SEQ ID NO: 24547 - DNA, 40 bp, Artificial Sequence
  Description of Artificial Sequence: Synthetic primer
tcccacaaggcgagtccgtggcgaggctgttcagggcatc

SEQ ID NO: 24548 - DNA, 40 bp, Artificial Sequence
  Description of Artificial Sequence: Synthetic primer
gagggaaggaaggagagtgaagagacaattattcaaactg

SEQ ID NO: 24549 - DNA, 40 bp, Artificial Sequence
  Description of Artificial Sequence: Synthetic primer
agtctgttccctgagcaccaaaacgccgctctctctgctg

SEQ ID NO: 24550 - DNA, 40 bp, Artificial Sequence
  Description of Artificial Sequence: Synthetic primer
caagttgggtagccatttccttggaagtcactccttctac

SEQ ID NO: 24551 - DNA, 40 bp, Artificial Sequence
  Description of Artificial Sequence: Synthetic primer
cttcacttatattaagcaatgagatatactaaacaatgag

SEQ ID NO: 24552 - DNA, 40 bp, Artificial Sequence
  Description of Artificial Sequence: Synthetic primer
aagcggccaatggtggtagacatgtgcatcagggagattg

SEQ ID NO: 24553 - DNA, 40 bp, Artificial Sequence
  Description of Artificial Sequence: Synthetic primer
cggcttctggggcttctgggtctggcaggggcggctcaac

SEQ ID NO: 24554 - DNA, 40 bp, Artificial Sequence
  Description of Artificial Sequence: Synthetic primer
tgcaactggcttcctagagtactttgatctcaacacagac

SEQ ID NO: 24555 - DNA, 40 bp, Artificial Sequence
  Description of Artificial Sequence: Synthetic primer
caagatcctggaccccacggccagcgtgccctccgtgttc

SEQ ID NO: 24556 - DNA, 40 bp, Artificial Sequence
  Description of Artificial Sequence: Synthetic primer
tcttcctggggttgtttctccgtgtgacgtgtggcctttg

SEQ ID NO: 24557 - DNA, 40 bp, Artificial Sequence
  Description of Artificial Sequence: Synthetic primer
agagctctgacacacagtaaaattgacaccccaagaccag

SEQ ID NO: 24558 - DNA, 40 bp, Artificial Sequence
  Description of Artificial Sequence: Synthetic primer
cagaccggggcgagtcctgtgaaagcagataaaagaaaac

SEQ ID NO: 24559 - DNA, 40 bp, Artificial Sequence
  Description of Artificial Sequence: Synthetic primer
gcagaaggcagagaatgagcttaaggagctggaacagaag

SEQ ID NO: 24560 - DNA, 40 bp, Artificial Sequence
  Description of Artificial Sequence: Synthetic primer
gaggagccattcggctcctcaagtccttcaattgctctcc

SEQ ID NO: 24561 - DNA, 40 bp, Artificial Sequence
  Description of Artificial Sequence: Synthetic primer
tgaggccacgcctcgctcagcccccacctgtggctttcac

SEQ ID NO: 24562 - DNA, 40 bp, Artificial Sequence
  Description of Artificial Sequence: Synthetic primer
gaagttgtagccgctgctgccctggtaactctggttaggg

SEQ ID NO: 24563 - DNA, 40 bp, Artificial Sequence
  Description of Artificial Sequence: Synthetic primer
tattttttaatagaacttaataaaatgtctagattgacta

SEQ ID NO: 24564 - DNA, 40 bp, Artificial Sequence
  Description of Artificial Sequence: Synthetic primer
caattccaatctcacactcaccgacaccgagcatgaaaac

SEQ ID NO: 24565 - DNA, 40 bp, Artificial Sequence
  Description of Artificial Sequence: Synthetic primer
gcgcgggagccggcgtgggcggcggcaacggggcactgac

SEQ ID NO: 24566 - DNA, 40 bp, Artificial Sequence
  Description of Artificial Sequence: Synthetic primer
tttcagcttcttcagtggagggcctcccagttcttcaggg

SEQ ID NO: 24567 - DNA, 40 bp, Artificial Sequence
  Description of Artificial Sequence: Synthetic primer
tttcgagcacgactagacagcctcttggaattttcgtcac

SEQ ID NO: 24568 - DNA, 40 bp, Artificial Sequence
  Description of Artificial Sequence: Synthetic primer
tactgggcggcccatgggggctcctggcctcttggttcag

SEQ ID NO: 24569 - DNA, 40 bp, Artificial Sequence
  Description of Artificial Sequence: Synthetic primer
cccagggcccttccagaccctggccacaggttgtcttttg

SEQ ID NO: 24570 - DNA, 40 bp, Artificial Sequence
  Description of Artificial Sequence: Synthetic primer
tatactccaaatactacacaccagttccctgcgagtctgc

SEQ ID NO: 24571 - DNA, 40 bp, Artificial Sequence
  Description of Artificial Sequence: Synthetic primer
gggggtgaggctgcggttggtaaacagctgcacgaacatc

SEQ ID NO: 24572 - DNA, 40 bp, Artificial Sequence
  Description of Artificial Sequence: Synthetic primer
ggggcctctcggccgcggagacgccgcggcttagagactg

SEQ ID NO: 24573 - DNA, 40 bp, Artificial Sequence
  Description of Artificial Sequence: Synthetic primer
gcgggcgtgaaggcggcgctcctactccctccccggactc

SEQ ID NO: 24574 - DNA, 40 bp, Artificial Sequence
  Description of Artificial Sequence: Synthetic primer
ggctctgcgctccgcccctcaagtccccggcagcggttgg

SEQ ID NO: 24575 - DNA, 40 bp, Artificial Sequence
  Description of Artificial Sequence: Synthetic primer
tttgttggaaataagtctaaaattggtgtggaaaacttag

SEQ ID NO: 24576 - DNA, 40 bp, Artificial Sequence
  Description of Artificial Sequence: Synthetic primer
gcgatcggaggaatgcctgagcgggacatggactcaacag

SEQ ID NO: 24577 - DNA, 40 bp, Artificial Sequence
  Description of Artificial Sequence: Synthetic primer
tgcggcttttctgcatcaactgctatgacggttaagaatg

SEQ ID NO: 24578 - DNA, 40 bp, Artificial Sequence
  Description of Artificial Sequence: Synthetic primer
tacttgtcatcagggatcgccacctcacacagtgccaagc

SEQ ID NO: 24579 - DNA, 40 bp, Artificial Sequence
  Description of Artificial Sequence: Synthetic primer
tattccacagctgttcaacactagtacacttgggaggttg

SEQ ID NO: 24580 - DNA, 40 bp, Artificial Sequence
  Description of Artificial Sequence: Synthetic primer
tgcagttaactacagatagcatttcaggacaaaatagatg

SEQ ID NO: 24581 - DNA, 40 bp, Artificial Sequence
  Description of Artificial Sequence: Synthetic primer
atgcttgagtctgcaggaggctatctccttcattttcaag

SEQ ID NO: 24582 - DNA, 40 bp, Artificial Sequence
  Description of Artificial Sequence: Synthetic primer
cgcggtacagggagggaactggtgcatattttagcctcag

SEQ ID NO: 24583 - DNA, 40 bp, Artificial Sequence
  Description of Artificial Sequence: Synthetic primer
gacatgagatccatcactaataatagctcagatcctttcc

SEQ ID NO: 24584 - DNA, 40 bp, Artificial Sequence
  Description of Artificial Sequence: Synthetic primer
ggggcgaggctgtggtgagccaccgatggtgctgtccttg

SEQ ID NO: 24585 - DNA, 40 bp, Artificial Sequence
  Description of Artificial Sequence: Synthetic primer
gtgagccatgggagggagagcaagcctctgactgctcaac

SEQ ID NO: 24586 - DNA, 40 bp, Artificial Sequence
  Description of Artificial Sequence: Synthetic primer
actagatcgacctcgggctagaaggctttcctcttcacag

SEQ ID NO: 24587 - DNA, 40 bp, Artificial Sequence
  Description of Artificial Sequence: Synthetic primer
gaattctgccttggtcctttatggtaaaacagataataac

SEQ ID NO: 24588 - DNA, 40 bp, Artificial Sequence
  Description of Artificial Sequence: Synthetic primer
ggcgtccgcgatggtttcagacgctgaaggattttgcatc

SEQ ID NO: 24589 - DNA, 40 bp, Artificial Sequence
  Description of Artificial Sequence: Synthetic primer
cggggtccaggcccaagtcctgtgaggtccccggaatcaa

SEQ ID NO: 24590 - DNA, 40 bp, Artificial Sequence
  Description of Artificial Sequence: Synthetic primer
gaagctcaggcagcagctgccgccaaggctgccaagtacg

SEQ ID NO: 24591 - DNA, 40 bp, Artificial Sequence
  Description of Artificial Sequence: Synthetic primer
atcagatctggactatattaggtcccctttaccatttcag

SEQ ID NO: 24592 - DNA, 40 bp, Artificial Sequence
  Description of Artificial Sequence: Synthetic primer
ccaagcgaggcaggagacgtgtgacaataccaaatggaac

SEQ ID NO: 24593 - DNA, 40 bp, Artificial Sequence
  Description of Artificial Sequence: Synthetic primer
gatggtcccatgggtggattaggaggaatggagtcacatc

SEQ ID NO: 24594 - DNA, 40 bp, Artificial Sequence
  Description of Artificial Sequence: Synthetic primer
aaatgataatctcagacaacaaaatgagactgctagtaag

SEQ ID NO: 24595 - DNA, 40 bp, Artificial Sequence
  Description of Artificial Sequence: Synthetic primer
gctggaagcctggggacttcccgcgaagggtgcggtggag

SEQ ID NO: 24596 - DNA, 40 bp, Artificial Sequence
  Description of Artificial Sequence: Synthetic primer
aaaactcaaggacccagaggggaaccaagttatgttatac

SEQ ID NO: 24597 - DNA, 40 bp, Artificial Sequence
  Description of Artificial Sequence: Synthetic primer
caccgtgtgtgttgctgggtgctggggctgtgacttatcc

SEQ ID NO: 24598 - DNA, 40 bp, Artificial Sequence
  Description of Artificial Sequence: Synthetic primer
ctttcaagctgctcatctgcttttccttgtctctaagctg

SEQ ID NO: 24599 - DNA, 40 bp, Artificial Sequence
  Description of Artificial Sequence: Synthetic primer
agttcgagaggctcgctcctctgtgatcggctcaattatg

SEQ ID NO: 24600 - DNA, 40 bp, Artificial Sequence
  Description of Artificial Sequence: Synthetic primer
gcccagtatctgttcccagtaacatggtgaaaggaagcac

SEQ ID NO: 24601 - DNA, 40 bp, Artificial Sequence
  Description of Artificial Sequence: Synthetic primer
gcctcttcctctcctcttcctcttgctgtctgcgcacttc

SEQ ID NO: 24602 - DNA, 40 bp, Artificial Sequence
  Description of Artificial Sequence: Synthetic primer
cttgttgcatagctcttcgactctctttggttcttttaac

SEQ ID NO: 24603 - DNA, 40 bp, Artificial Sequence
  Description of Artificial Sequence: Synthetic primer
gaggaaggcagccaagaggaagtgggcggcacagaccatc

SEQ ID NO: 24604 - DNA, 40 bp, Artificial Sequence
  Description of Artificial Sequence: Synthetic primer
ccctgcttcagcaaggggagcagctgttggaagaaaatgg

SEQ ID NO: 24605 - DNA, 40 bp, Artificial Sequence
  Description of Artificial Sequence: Synthetic primer
ttgggcttccgaagcttgactcttgagttatggatgttgg

SEQ ID NO: 24606 - DNA, 40 bp, Artificial Sequence
  Description of Artificial Sequence: Synthetic primer
gagagctctggaagcggaaagggaagctattatatctgag

SEQ ID NO: 24607 - DNA, 40 bp, Artificial Sequence
  Description of Artificial Sequence: Synthetic primer
tacgttgctcactattacgtataatccttttcttttcaag

SEQ ID NO: 24608 - DNA, 40 bp, Artificial Sequence
  Description of Artificial Sequence: Synthetic primer
ttgccaagttcaagaaattttccaattctatccctcagtc

SEQ ID NO: 24609 - DNA, 40 bp, Artificial Sequence
  Description of Artificial Sequence: Synthetic primer
ctgtcggagacctcttaccagcccacatctattccacaag

SEQ ID NO: 24610 - DNA, 40 bp, Artificial Sequence
  Description of Artificial Sequence: Synthetic primer
ttcctggtctacaaactcaaatgtaatttggcacgaggtc

SEQ ID NO: 24611 - DNA, 40 bp, Artificial Sequence
  Description of Artificial Sequence: Synthetic primer
tgcagcactgtggatgggccgtgcacacagagctgcgagg

SEQ ID NO: 24612 - DNA, 40 bp, Artificial Sequence
  Description of Artificial Sequence: Synthetic primer
gtgacgagggctttgcgtacagctcccaggagaaggcttg

SEQ ID NO: 24613 - DNA, 40 bp, Artificial Sequence
  Description of Artificial Sequence: Synthetic primer
tgacatacacttatgaatggataagccatcactacctctg

SEQ ID NO: 24614 - DNA, 40 bp, Artificial Sequence
  Description of Artificial Sequence: Synthetic primer
ttagtaaacacatactcgtttcctgacagtcttctcaagc

SEQ ID NO: 24615 - DNA, 40 bp, Artificial Sequence
  Description of Artificial Sequence: Synthetic primer
attcagtacaaggtatatttatgttatttccaaagccatc

SEQ ID NO: 24616 - DNA, 40 bp, Artificial Sequence
  Description of Artificial Sequence: Synthetic primer
gccgtttaccatgagatccttattggatatttagagtatg

SEQ ID NO: 24617 - DNA, 40 bp, Artificial Sequence
  Description of Artificial Sequence: Synthetic primer
ccggaaggagttaggaccatatgtatttagagaggcacag

SEQ ID NO: 24618 - DNA, 40 bp, Artificial Sequence
  Description of Artificial Sequence: Synthetic primer
acatgaatatttttagcctacagaattcagattagctttg

SEQ ID NO: 24619 - DNA, 40 bp, Artificial Sequence
  Description of Artificial Sequence: Synthetic primer
gccttttttatcctcaaatgaacagtttcccaattacttc

SEQ ID NO: 24620 - DNA, 40 bp, Artificial Sequence
  Description of Artificial Sequence: Synthetic primer
cacatttggggagcttgccattttatacaattgtacaagg

SEQ ID NO: 24621 - DNA, 40 bp, Artificial Sequence
  Description of Artificial Sequence: Synthetic primer
actcctgaagttgctgcagcgcctaagccagatgctgctc

SEQ ID NO: 24622 - DNA, 40 bp, Artificial Sequence
  Description of Artificial Sequence: Synthetic primer
gcttccaagttgttaacggaatttagactctgaacgaatc

SEQ ID NO: 24623 - DNA, 40 bp, Artificial Sequence
  Description of Artificial Sequence: Synthetic primer
aaaaaaactcccacaattctggaactataatactgtaagc

SEQ ID NO: 24624 - DNA, 40 bp, Artificial Sequence
  Description of Artificial Sequence: Synthetic primer
ggttttggtacaccattttcagcagtttcatcttcaattc

SEQ ID NO: 24625 - DNA, 40 bp, Artificial Sequence
  Description of Artificial Sequence: Synthetic primer
ccaagcctctttgcctgtgttacctggggtggaccgcttg

SEQ ID NO: 24626 - DNA, 40 bp, Artificial Sequence
  Description of Artificial Sequence: Synthetic primer
ggtcccacagctaatttacccctggagatgggctcaggac

SEQ ID NO: 24627 - DNA, 40 bp, Artificial Sequence
  Description of Artificial Sequence: Synthetic primer
agggctgccagagtaagcaggaaaacagatgattctgaag

SEQ ID NO: 24628 - DNA, 40 bp, Artificial Sequence
  Description of Artificial Sequence: Synthetic primer
ttcaccacctccagatgatttgaatgagtcaccagagttc

SEQ ID NO: 24629 - DNA, 40 bp, Artificial Sequence
  Description of Artificial Sequence: Synthetic primer
taaaaaatttgggttccaaacacatcatatgtgaaaagac

SEQ ID NO: 24630 - DNA, 40 bp, Artificial Sequence
  Description of Artificial Sequence: Synthetic primer
ggagagctgcactctcagcctttgcttttgttcgaacctg

SEQ ID NO: 24631 - DNA, 40 bp, Artificial Sequence
  Description of Artificial Sequence: Synthetic primer
ggcgcccctcggaaaggagccggagacccagctgacttcg

SEQ ID NO: 24632 - DNA, 40 bp, Artificial Sequence
  Description of Artificial Sequence: Synthetic primer
ccaggagtgtaaggaatgtgaccaagtttttcctgatttg

SEQ ID NO: 24633 - DNA, 40 bp, Artificial Sequence
  Description of Artificial Sequence: Synthetic primer
ggtggctgagtgcaccctgaaggaaagtgcagccattaac

SEQ ID NO: 24634 - DNA, 40 bp, Artificial Sequence
  Description of Artificial Sequence: Synthetic primer
caggtgggcgtccctgaacagtgagagctacataggaacc

SEQ ID NO: 24635 - DNA, 40 bp, Artificial Sequence
  Description of Artificial Sequence: Synthetic primer
aatcacagtatactttgatagcatccatagtgcatccttg

SEQ ID NO: 24636 - DNA, 40 bp, Artificial Sequence
  Description of Artificial Sequence: Synthetic primer
cagctgctgctgctgctgctggccgcggagtgcgcgcttg

SEQ ID NO: 24637 - DNA, 40 bp, Artificial Sequence
  Description of Artificial Sequence: Synthetic primer
cgcttttttgcacacactgccatctcacccagcaagatcc

SEQ ID NO: 24638 - DNA, 40 bp, Artificial Sequence
  Description of Artificial Sequence: Synthetic primer
tgcctgacgtaatctttgaggatctgcactcgcatgtctg

SEQ ID NO: 24639 - DNA, 40 bp, Artificial Sequence
  Description of Artificial Sequence: Synthetic primer
ataaagagttaaaaatataaaaataagaaacacacactgc

SEQ ID NO: 24640 - DNA, 40 bp, Artificial Sequence
  Description of Artificial Sequence: Synthetic primer
gctgcagcacgtggcgggacctgccctggaggctcttagc

SEQ ID NO: 24641 - DNA, 40 bp, Artificial Sequence
  Description of Artificial Sequence: Synthetic primer
gcagccaggagatggttcgggcctagcggagccgggactg

SEQ ID NO: 24642 - DNA, 40 bp, Artificial Sequence
  Description of Artificial Sequence: Synthetic primer
tcagcaacttctgcactctggagttgacacccacaattcg

SEQ ID NO: 24643 - DNA, 40 bp, Artificial Sequence
  Description of Artificial Sequence: Synthetic primer
cagccatcagttattcagtctccacaagtccaaacagttc

SEQ ID NO: 24644 - DNA, 40 bp, Artificial Sequence
  Description of Artificial Sequence: Synthetic primer
tctttcagggagcctctctttggtgctacaacatctttcc

SEQ ID NO: 24645 - DNA, 40 bp, Artificial Sequence
  Description of Artificial Sequence: Synthetic primer
aacatcacattgggggaaccaccaggattcttacattctt

SEQ ID NO: 24646 - DNA, 40 bp, Artificial Sequence
  Description of Artificial Sequence: Synthetic primer
ggctgatagcttttacatcatagagtctggcgaagtgagc

SEQ ID NO: 24647 - DNA, 40 bp, Artificial Sequence
  Description of Artificial Sequence: Synthetic primer
cccaaagaaggttcttttgaactttatggagaccgagtcc

SEQ ID NO: 24648 - DNA, 40 bp, Artificial Sequence
  Description of Artificial Sequence: Synthetic primer
atgtacatgtgtggcatgtggaaaatttcaaataaaatgg

SEQ ID NO: 24649 - DNA, 40 bp, Artificial Sequence
  Description of Artificial Sequence: Synthetic primer
aatagtatgtcttcataaaactaccatgaataaaacaaac

SEQ ID NO: 24650 - DNA, 40 bp, Artificial Sequence
  Description of Artificial Sequence: Synthetic primer
ccgggcctgcaggtgcagatgcggttctgttcccgagtgc

SEQ ID NO: 24651 - DNA, 40 bp, Artificial Sequence
  Description of Artificial Sequence: Synthetic primer
accctggactactccagcaacaccatggagtcagcgcttc

SEQ ID NO: 24652 - DNA, 40 bp, Artificial Sequence
  Description of Artificial Sequence: Synthetic primer
agccacaccgtgggctgggccaaggtgttctgggcattcc

SEQ ID NO: 24653 - DNA, 40 bp, Artificial Sequence
  Description of Artificial Sequence: Synthetic primer
aacaatgcgacggccactgttctctgggacaatgcttttg

SEQ ID NO: 24654 - DNA, 40 bp, Artificial Sequence
  Description of Artificial Sequence: Synthetic primer
acgccaactccaggagccacgccgacaccaggaactaacc

SEQ ID NO: 24655 - DNA, 40 bp, Artificial Sequence
  Description of Artificial Sequence: Synthetic primer
aatatatttctttcctggttatataaagataagttgactc

SEQ ID NO: 24656 - DNA, 40 bp, Artificial Sequence
  Description of Artificial Sequence: Synthetic primer
caagcagcgctaaccaggccagaagagttatcctatgaag

SEQ ID NO: 24657 - DNA, 40 bp, Artificial Sequence
  Description of Artificial Sequence: Synthetic primer
cccagagtgaagatctcccacaggagcaccccgaaagacc

SEQ ID NO: 24658 - DNA, 40 bp, Artificial Sequence
  Description of Artificial Sequence: Synthetic primer
acctgatgagaatggagtcattacttttgactgccgaaac

SEQ ID NO: 24659 - DNA, 40 bp, Artificial Sequence
  Description of Artificial Sequence: Synthetic primer
aaccagaccatcaatggccacttcctcaaggagccctttc

SEQ ID NO: 24660 - DNA, 40 bp, Artificial Sequence
  Description of Artificial Sequence: Synthetic primer
gaatttctactaaaatacgtctttgttttcaacacccaac

SEQ ID NO: 24661 - DNA, 40 bp, Artificial Sequence
  Description of Artificial Sequence: Synthetic primer
ggccttcagccaggacccaggggcccgtgaagtgtgagag

SEQ ID NO: 24662 - DNA, 40 bp, Artificial Sequence
  Description of Artificial Sequence: Synthetic primer
tttaagagatgtgcatgcattctatttagtcttcagaatg

SEQ ID NO: 24663 - DNA, 40 bp, Artificial Sequence
  Description of Artificial Sequence: Synthetic primer
accgattcttggaagctggccatctgtcttttatccactc

SEQ ID NO: 24664 - DNA, 40 bp, Artificial Sequence
  Description of Artificial Sequence: Synthetic primer
attgggctgcaactacagtgacaactaccaggaactgatg

SEQ ID NO: 24665 - DNA, 40 bp, Artificial Sequence
  Description of Artificial Sequence: Synthetic primer
ccgctgtccagcttcctcgggccacacaccccgtcacatc

SEQ ID NO: 24666 - DNA, 40 bp, Artificial Sequence
  Description of Artificial Sequence: Synthetic primer
cggcgaggtgcacattggaggcgtgatgcttaagctggtg

SEQ ID NO: 24667 - DNA, 40 bp, Artificial Sequence
  Description of Artificial Sequence: Synthetic primer
ctgtgggctactcgcatggtactgtgaatagcacaccttc

SEQ ID NO: 24668 - DNA, 40 bp, Artificial Sequence
  Description of Artificial Sequence: Synthetic primer
tcggcttgactacactgtgtggagcaagttttaaagaagc

SEQ ID NO: 24669 - DNA, 40 bp, Artificial Sequence
  Description of Artificial Sequence: Synthetic primer
cagcgccccctcccgactaaggacaggaagaaccatagag

SEQ ID NO: 24670 - DNA, 40 bp, Artificial Sequence
  Description of Artificial Sequence: Synthetic primer
agccgcacctttgccgtgtacctcaatagcactggctacc

SEQ ID NO: 24671 - DNA, 40 bp, Artificial Sequence
  Description of Artificial Sequence: Synthetic primer
agacctggtctccagcctcacctcggggctgctcaccatc

SEQ ID NO: 24672 - DNA, 40 bp, Artificial Sequence
  Description of Artificial Sequence: Synthetic primer
aactttgctattatttcttcaattgttgatcagaattttt

SEQ ID NO: 24673 - DNA, 40 bp, Artificial Sequence
  Description of Artificial Sequence: Synthetic primer
cgagactctgtgcatgaccgtgctggaagaaagcagcatc

SEQ ID NO: 24674 - DNA, 40 bp, Artificial Sequence
  Description of Artificial Sequence: Synthetic primer
atagaaggatcctttagtgattcttctgaacctgatgaag

SEQ ID NO: 24675 - DNA, 40 bp, Artificial Sequence
  Description of Artificial Sequence: Synthetic primer
tcttatcggctagaacaggcgtggttgcagcaaaagaaag

SEQ ID NO: 24676 - DNA, 40 bp, Artificial Sequence
  Description of Artificial Sequence: Synthetic primer
gaagcctttccccctgtctccgtcaccactctgggctctc

SEQ ID NO: 24677 - DNA, 40 bp, Artificial Sequence
  Description of Artificial Sequence: Synthetic primer
atcgagccctttgacgacagaaccccgaccattgccaacc

SEQ ID NO: 24678 - DNA, 40 bp, Artificial Sequence
  Description of Artificial Sequence: Synthetic primer
accaattactcagatattccaagacactagttactgttgc

SEQ ID NO: 24679 - DNA, 40 bp, Artificial Sequence
  Description of Artificial Sequence: Synthetic primer
catgttaggacattatgtaaattgtgaggattcttatgtg

SEQ ID NO: 24680 - DNA, 40 bp, Artificial Sequence
  Description of Artificial Sequence: Synthetic primer
gtgattaagggaagattcccaaaatgttgaggctatggag

SEQ ID NO: 24681 - DNA, 40 bp, Artificial Sequence
  Description of Artificial Sequence: Synthetic primer
tctgtgaaaggtcttcatcaagcaataacgtatttagtgg

SEQ ID NO: 24682 - DNA, 40 bp, Artificial Sequence
  Description of Artificial Sequence: Synthetic primer
gctatccagagccacactgcatctgcacccagcaccatac

SEQ ID NO: 24683 - DNA, 40 bp, Artificial Sequence
  Description of Artificial Sequence: Synthetic primer
gcagcagctgcagggtcttctggtgcttctcggccagctc

SEQ ID NO: 24684 - DNA, 40 bp, Artificial Sequence
  Description of Artificial Sequence: Synthetic primer
ttcagtacaaactgagaattttgaaactatttggtgatcc

SEQ ID NO: 24685 - DNA, 40 bp, Artificial Sequence
  Description of Artificial Sequence: Synthetic primer
acattttttggggaagatatgatgccaaacttaccatgac

SEQ ID NO: 24686 - DNA, 40 bp, Artificial Sequence
  Description of Artificial Sequence: Synthetic primer
caattctcacacacctgtgagacccccaagtacttctagt

SEQ ID NO: 24687 - DNA, 40 bp, Artificial Sequence
  Description of Artificial Sequence: Synthetic primer
gagtcagccagcaacaccctcaggaccaagaagaacacag

SEQ ID NO: 24688 - DNA, 40 bp, Artificial Sequence
  Description of Artificial Sequence: Synthetic primer
taggacatggccattgtcaattcctcgtcactggaaaagg

SEQ ID NO: 24689 - DNA, 40 bp, Artificial Sequence
  Description of Artificial Sequence: Synthetic primer
gcggaaaacgacaccctttgctggaatggacaagaactcg

SEQ ID NO: 24690 - DNA, 40 bp, Artificial Sequence
  Description of Artificial Sequence: Synthetic primer
gagcctggtctgctttctcactcttggagtatcaataacc

SEQ ID NO: 24691 - DNA, 40 bp, Artificial Sequence
  Description of Artificial Sequence: Synthetic primer
ctgtggtcttcctcgataaagggaaccactttcttatttt

SEQ ID NO: 24692 - DNA, 40 bp, Artificial Sequence
  Description of Artificial Sequence: Synthetic primer
gtacagctttccccaaaaatctggagctttgcaggcatgg

SEQ ID NO: 24693 - DNA, 40 bp, Artificial Sequence
  Description of Artificial Sequence: Synthetic primer
atgttcataatgaaatgaatggggaagaaaagggactagc

SEQ ID NO: 24694 - DNA, 40 bp, Artificial Sequence
  Description of Artificial Sequence: Synthetic primer
caggagccgctgccagggcctcccccagaaatccgctggg

SEQ ID NO: 24695 - DNA, 40 bp, Artificial Sequence
  Description of Artificial Sequence: Synthetic primer
cgaggaggaagacgaatcgttaaacatctgaaagggtcag

SEQ ID NO: 24696 - DNA, 40 bp, Artificial Sequence
  Description of Artificial Sequence: Synthetic primer
ccacccctcggtttggtttcggccgggcagccgcgagaag

SEQ ID NO: 24697 - DNA, 40 bp, Artificial Sequence
  Description of Artificial Sequence: Synthetic primer
tccccccttctctttttctaatctttttgagattgttttt

SEQ ID NO: 24698 - DNA, 40 bp, Artificial Sequence
  Description of Artificial Sequence: Synthetic primer
gagcctgggactcaggtggggcacaagcataaaaggttcc

SEQ ID NO: 24699 - DNA, 40 bp, Artificial Sequence
  Description of Artificial Sequence: Synthetic primer
aatatttttgccaaatatgagacaggctcactctccactg

SEQ ID NO: 24700 - DNA, 40 bp, Artificial Sequence
  Description of Artificial Sequence: Synthetic primer
ggtggctctcagaggagagccttgggggctctgagcagca

SEQ ID NO: 24701 - DNA, 40 bp, Artificial Sequence
  Description of Artificial Sequence: Synthetic primer
aaaaccacaggggtgttttacaatgctttttaagatcgag

SEQ ID NO: 24702 - DNA, 40 bp, Artificial Sequence
  Description of Artificial Sequence: Synthetic primer
gccatcatcgctgttgtgcaaaagatgattgaaaattatg

SEQ ID NO: 24703 - DNA, 40 bp, Artificial Sequence
  Description of Artificial Sequence: Synthetic primer
tacaaagcaacaggtgaagatttccttaaaattgctggtg

SEQ ID NO: 24704 - DNA, 40 bp, Artificial Sequence
  Description of Artificial Sequence: Synthetic primer
tctccctatcttctttcagctacatttacaagcatttgac

SEQ ID NO: 24705 - DNA, 40 bp, Artificial Sequence
  Description of Artificial Sequence: Synthetic primer
caagggtcttctagggtctcagaggcgggtgtcactcttc

SEQ ID NO: 24706 - DNA, 40 bp, Artificial Sequence
  Description of Artificial Sequence: Synthetic primer
tccgggattcccagccatggcagattcctccgggcagcag

SEQ ID NO: 24707 - DNA, 40 bp, Artificial Sequence
  Description of Artificial Sequence: Synthetic primer
attcatttgtacaattaaatactagcttttgctcagagac

SEQ ID NO: 24708 - DNA, 40 bp, Artificial Sequence
  Description of Artificial Sequence: Synthetic primer
acaatgacattgtgtgtggactggaacaggtcactactgc

SEQ ID NO: 24709 - DNA, 40 bp, Artificial Sequence
  Description of Artificial Sequence: Synthetic primer
tgctcctcagctcccggttctcctcctgtgtcgcctttac

SEQ ID NO: 24710 - DNA, 40 bp, Artificial Sequence
  Description of Artificial Sequence: Synthetic primer
cagtgatcccttcaatttcaacagtcaaaatggtgtgaac

SEQ ID NO: 24711 - DNA, 40 bp, Artificial Sequence
  Description of Artificial Sequence: Synthetic primer
catatccgctggaggtgaccaaactcatctactgctcaag

SEQ ID NO: 24712 - DNA, 40 bp, Artificial Sequence
  Description of Artificial Sequence: Synthetic primer
acaacacagtttcttgagcgagacaaaatgcctaattttc

SEQ ID NO: 24713 - DNA, 40 bp, Artificial Sequence
  Description of Artificial Sequence: Synthetic primer
gcgtcagcctggacgtggacaatggcaacatgtacaagag

SEQ ID NO: 24714 - DNA, 40 bp, Artificial Sequence
  Description of Artificial Sequence: Synthetic primer
ctggacttccctgggttcctggacatgatggcacctcgac

SEQ ID NO: 24715 - DNA, 40 bp, Artificial Sequence
  Description of Artificial Sequence: Synthetic primer
gggaaaaaaatagtgggaagttttcatctttgcctatgag

SEQ ID NO: 24716 - DNA, 40 bp, Artificial Sequence
  Description of Artificial Sequence: Synthetic primer
tggccctgcttctgcccgttcaccggactcccggctttag

SEQ ID NO: 24717 - DNA, 40 bp, Artificial Sequence
  Description of Artificial Sequence: Synthetic primer
ctgggatctctttttagtcaatgcaacagaaaagaatagg

SEQ ID NO: 24718 - DNA, 40 bp, Artificial Sequence
  Description of Artificial Sequence: Synthetic primer
cctgtcaagtaaccggctcaccacactctcgtggcagctc

SEQ ID NO: 24719 - DNA, 40 bp, Artificial Sequence
  Description of Artificial Sequence: Synthetic primer
gcctgcgagtcatttctgcaaggtgccatttgtcatgtgc

SEQ ID NO: 24720 - DNA, 40 bp, Artificial Sequence
  Description of Artificial Sequence: Synthetic primer
tctgaatctgtataagaaaaataaagacaattgaacttcc

SEQ ID NO: 24721 - DNA, 40 bp, Artificial Sequence
  Description of Artificial Sequence: Synthetic primer
gtctgcttgagctcccgcacgcggctcagggtggccttgc

SEQ ID NO: 24722 - DNA, 40 bp, Artificial Sequence
  Description of Artificial Sequence: Synthetic primer
atgatagctgcacaggcgtgttttatgtataattttcagc

SEQ ID NO: 24723 - DNA, 40 bp, Artificial Sequence
  Description of Artificial Sequence: Synthetic primer
agccggctttgcctatcgccgcaaatacgaagctttcctg

SEQ ID NO: 24724 - DNA, 40 bp, Artificial Sequence
  Description of Artificial Sequence: Synthetic primer
cccagacatttgattggtttagaattcatttgggtcagtg

SEQ ID NO: 24725 - DNA, 40 bp, Artificial Sequence
  Description of Artificial Sequence: Synthetic primer
taaaactaaaccctttagtgacatttggcaatgagtggag

SEQ ID NO: 24726 - DNA, 40 bp, Artificial Sequence
  Description of Artificial Sequence: Synthetic primer
ggaaaggataagcctcgacttagaagctaccgagttaccc

SEQ ID NO: 24727 - DNA, 40 bp, Artificial Sequence
  Description of Artificial Sequence: Synthetic primer
gcagcgctcggctccttaggcgagccccattccggtctgc

SEQ ID NO: 24728 - DNA, 40 bp, Artificial Sequence
  Description of Artificial Sequence: Synthetic primer
cattctcaattcccagccaccactctgatactcctaccac

SEQ ID NO: 24729 - DNA, 40 bp, Artificial Sequence; identical to SEQ ID NO: 64
  Description of Artificial Sequence: Synthetic primer

SEQ ID NO: 24730 - DNA, 40 bp, Artificial Sequence
  Description of Artificial Sequence: Synthetic primer
tgtaccttctgtcacaaagacccaagcttcctccagcttc

SEQ ID NO: 24731 - DNA, 40 bp, Artificial Sequence
  Description of Artificial Sequence: Synthetic primer
tgatctcatttttttaaataaacattttgtttccttgacg

SEQ ID NO: 24732 - DNA, 40 bp, Artificial Sequence
  Description of Artificial Sequence: Synthetic primer
ttacattaaatagaagaaaaacaattatactctcattcac

SEQ ID NO: 24733 - DNA, 40 bp, Artificial Sequence
  Description of Artificial Sequence: Synthetic primer
ctccctgcttgcacacttccccatctttgatccttctgag

SEQ ID NO: 24734 - DNA, 40 bp, Artificial Sequence
  Description of Artificial Sequence: Synthetic primer
cggccacaggcgcggcgtcctcggcggcgggcggcagcta

SEQ ID NO: 24735 - DNA, 40 bp, Artificial Sequence
  Description of Artificial Sequence: Synthetic primer
agcccggcaaacaggtgtgtagcccaggcggctcagatgc

SEQ ID NO: 24736 - DNA, 40 bp, Artificial Sequence
  Description of Artificial Sequence: Synthetic primer
cacggcgtgtggattggtggtgtggcctgtgagccactgc

SEQ ID NO: 24737 - DNA, 40 bp, Artificial Sequence
  Description of Artificial Sequence: Synthetic primer
agagaaagaaatctttaagaaagaaactggattcactagg

SEQ ID NO: 24738 - DNA, 40 bp, Artificial Sequence
  Description of Artificial Sequence: Synthetic primer
acctcatgaggaattgaagaaaagtgggagaggcaaaaag

SEQ ID NO: 24739 - DNA, 40 bp, Artificial Sequence
  Description of Artificial Sequence: Synthetic primer
gaacattctcaaatcaaacccgcagctaatggcagctttc

SEQ ID NO: 24740 - DNA, 40 bp, Artificial Sequence
  Description of Artificial Sequence: Synthetic primer
atgctcaaaatttaaatctaaaataaaagcccagaaactg

SEQ ID NO: 24741 - DNA, 40 bp, Artificial Sequence
  Description of Artificial Sequence: Synthetic primer
ggagggccaccaggaacacccatcatgcctagtccagcag

SEQ ID NO: 24742 - DNA, 40 bp, Artificial Sequence
  Description of Artificial Sequence: Synthetic primer
ggaatcttctttataataaaagccttacggacaaacctac

SEQ ID NO: 24743 - DNA, 40 bp, Artificial Sequence
  Description of Artificial Sequence: Synthetic primer
gctaataatgaatgttaaagagtacatattttcaggatcg

SEQ ID NO: 24744 - DNA, 40 bp, Artificial Sequence
  Description of Artificial Sequence: Synthetic primer
atggatcctttgtctctgaaaagacctttgaaacactttg

SEQ ID NO: 24745 - DNA, 40 bp, Artificial Sequence
  Description of Artificial Sequence: Synthetic primer
tggatcggcatctagtctttccgcttcttgaatttctctc

SEQ ID NO: 24746 - DNA, 40 bp, Artificial Sequence
  Description of Artificial Sequence: Synthetic primer
ttatcagctttcagggccatggttcacattagaataaaag

SEQ ID NO: 24747 - DNA, 40 bp, Artificial Sequence
  Description of Artificial Sequence: Synthetic primer
catcatcttcgttgatgatttctaaccttttctggtttgc

SEQ ID NO: 24748 - DNA, 40 bp, Artificial Sequence
  Description of Artificial Sequence: Synthetic primer
gagagtaaatgactctagggcagacttgccaaaccctagc

SEQ ID NO: 24749 - DNA, 40 bp, Artificial Sequence
  Description of Artificial Sequence: Synthetic primer
ggccttgttgtatatttgtggtttagtgttggcttctttc

SEQ ID NO: 24750 - DNA, 40 bp, Artificial Sequence
  Description of Artificial Sequence: Synthetic primer
taggttcttttggacaaacatgataaacttcttcagatac

SEQ ID NO: 24751 - DNA, 40 bp, Artificial Sequence
  Description of Artificial Sequence: Synthetic primer
atgttagtccagagaggttatgaatctgacccagtgaaag

SEQ ID NO: 24752 - DNA, 40 bp, Artificial Sequence
  Description of Artificial Sequence: Synthetic primer
ttcattcagcttctctgtgccagggaggccagtgaggttc

SEQ ID NO: 24753 - DNA, 40 bp, Artificial Sequence
  Description of Artificial Sequence: Synthetic primer
tcacttgaacggacatatcaagcaggtgcacacttctgag

SEQ ID NO: 24754 - DNA, 40 bp, Artificial Sequence
  Description of Artificial Sequence: Synthetic primer
ctggggcaggtgccagacacggatatttacagagatgtgg

SEQ ID NO: 24755 - DNA, 40 bp, Artificial Sequence
  Description of Artificial Sequence: Synthetic primer
ctccctctccccattagtctttggggtgcatacataagtg

SEQ ID NO: 24756 - DNA, 40 bp, Artificial Sequence
  Description of Artificial Sequence: Synthetic primer
ccgcggacgacatgatgttccgtctgcgtcacccgctgct

SEQ ID NO: 24757 - DNA, 40 bp, Artificial Sequence
  Description of Artificial Sequence: Synthetic primer
ttggcacttgggtggcggcacacctgtcctgtctgctcac

SEQ ID NO: 24758 - DNA, 40 bp, Artificial Sequence
  Description of Artificial Sequence: Synthetic primer
agcggtcttcctgggcacggtcaacgggaggcttctcaag

SEQ ID NO: 24759 - DNA, 40 bp, Artificial Sequence
  Description of Artificial Sequence: Synthetic primer
ggctctcagagcaagggccacaaagccgatggcacagatg

SEQ ID NO: 24760 - DNA, 40 bp, Artificial Sequence
  Description of Artificial Sequence: Synthetic primer
tggggtctcctctcctctgagcagccacatagaacattcc

SEQ ID NO: 24761 - DNA, 40 bp, Artificial Sequence
  Description of Artificial Sequence: Synthetic primer
ccaatatttgtaggttattattcccaaattccaataatgc

SEQ ID NO: 24762 - DNA, 40 bp, Artificial Sequence
  Description of Artificial Sequence: Synthetic primer
gaatgcacctatctgtctcactgtcccttctgaatcttcc

SEQ ID NO: 24763 - DNA, 40 bp, Artificial Sequence
  Description of Artificial Sequence: Synthetic primer
tttcctcctccaccaggcgctccacctccatctcttatac

SEQ ID NO: 24764 - DNA, 40 bp, Artificial Sequence
  Description of Artificial Sequence: Synthetic primer
gctcctcttgtcatcagctcccagaggagcacgccaaagg

SEQ ID NO: 24765 - DNA, 40 bp, Artificial Sequence
  Description of Artificial Sequence: Synthetic primer
caacaaaaaagcacaaaagacacaaacactcttcaacagg

SEQ ID NO: 24766 - DNA, 40 bp, Artificial Sequence
  Description of Artificial Sequence: Synthetic primer
tgtgtttgacgtcctgggacacaaagctgaattgggagag

SEQ ID NO: 24767 - DNA, 40 bp, Artificial Sequence
  Description of Artificial Sequence: Synthetic primer
gtttacactgtcaaacatctggaaaataaaaggtctatgc

SEQ ID NO: 24768 - DNA, 40 bp, Artificial Sequence
  Description of Artificial Sequence: Synthetic primer
ggcaggcggcgctggggaccctgaagcccgccttgtctcc

SEQ ID NO: 24769 - DNA, 40 bp, Artificial Sequence
  Description of Artificial Sequence: Synthetic primer
tccaaatggattctaccaactccaaatgagaagtttccac

SEQ ID NO: 24770 - DNA, 40 bp, Artificial Sequence
  Description of Artificial Sequence: Synthetic primer
gaaaacctcttttaccctgttaccctggaagttcttcatc

SEQ ID NO: 24771 - DNA, 40 bp, Artificial Sequence
  Description of Artificial Sequence: Synthetic primer
gaaagtttccgagacaaatcccgggaaagtttggaagaag

SEQ ID NO: 24772 - DNA, 40 bp, Artificial Sequence
  Description of Artificial Sequence: Synthetic primer
ttttttagaattggcgtaatccattatagtgacttctagc

SEQ ID NO: 24773 - DNA, 40 bp, Artificial Sequence
  Description of Artificial Sequence: Synthetic primer
gtgagcttcctctgccaactaggttgcggctattgtctcc

SEQ ID NO: 24774 - DNA, 40 bp, Artificial Sequence
  Description of Artificial Sequence: Synthetic primer
cagtggaggaagtgggggttatggtgggaggagccgatac

SEQ ID NO: 24775 - DNA, 40 bp, Artificial Sequence
  Description of Artificial Sequence: Synthetic primer
taccaagaacagcattcaccaggcggctctggccagcttt

SEQ ID NO: 24776 - DNA, 40 bp, Artificial Sequence
  Description of Artificial Sequence: Synthetic primer
aggaaaaaaattggtgacagagcacaaatagaaaacctat

SEQ ID NO: 24777 - DNA, 40 bp, Artificial Sequence
  Description of Artificial Sequence: Synthetic primer
ccactaattcaggctttgcatatggtcagaacaaaactgc

SEQ ID NO: 24778 - DNA, 40 bp, Artificial Sequence
  Description of Artificial Sequence: Synthetic primer
gacaagaatggacccaggtgtctcaaaatctatttcttcc

SEQ ID NO: 24779 - DNA, 40 bp, Artificial Sequence
  Description of Artificial Sequence: Synthetic primer
caatcgtgaggattggtcggtgtgggaggttgtattatag

SEQ ID NO: 24780 - DNA, 40 bp, Artificial Sequence
  Description of Artificial Sequence: Synthetic primer
ggtggcacaggtggctttggcacaacttcaacatttggac

SEQ ID NO: 24781 - DNA, 40 bp, Artificial Sequence
  Description of Artificial Sequence: Synthetic primer
aagccgagcggcccacggccaggtcggagcagtacttgac

SEQ ID NO: 24782 - DNA, 40 bp, Artificial Sequence
  Description of Artificial Sequence: Synthetic primer
tggtagctgggcgcccgcccctcctccactttgatcaagg

SEQ ID NO: 24783 - DNA, 40 bp, Artificial Sequence
  Description of Artificial Sequence: Synthetic primer
agtaatgtgacacataatgcatgtaccttgttctcatatt

SEQ ID NO: 24784 - DNA, 40 bp, Artificial Sequence
  Description of Artificial Sequence: Synthetic primer
aggtagtgcggaaaagaaaaatcttaaggtaatattgtgg

SEQ ID NO: 24785 - DNA, 40 bp, Artificial Sequence
  Description of Artificial Sequence: Synthetic primer
cattcatggcgatgacggtgcgctgccagtctctgtcctg

SEQ ID NO: 24786 - DNA, 40 bp, Artificial Sequence
  Description of Artificial Sequence: Synthetic primer
agaggagaatggtgtggatatggttctgagttatagtgtc

SEQ ID NO: 24787 - DNA, 40 bp, Artificial Sequence
  Description of Artificial Sequence: Synthetic primer
atgtctttacaaggcaatgcattttcacaaatgaagaaac

SEQ ID NO: 24788 - DNA, 40 bp, Artificial Sequence
  Description of Artificial Sequence: Synthetic primer
ctccagcagccgctcctgctgatacaaagtctctcttgtc

SEQ ID NO: 24789 - DNA, 40 bp, Artificial Sequence
  Description of Artificial Sequence: Synthetic primer
tcctgaagatacttagggaaaacaggagcctaccacaagg

SEQ ID NO: 24790 - DNA, 40 bp, Artificial Sequence
  Description of Artificial Sequence: Synthetic primer
ctctgtagagtggctccaccccagtgatctggcctcagac

SEQ ID NO: 24791 - DNA, 40 bp, Artificial Sequence
  Description of Artificial Sequence: Synthetic primer
gggccttccccgaaggcgcccggtttggagcctcccaacc

SEQ ID NO: 24792 - DNA, 40 bp, Artificial Sequence
  Description of Artificial Sequence: Synthetic primer
tggaggtccacggcagtgggagtggggctcactggcttcc

SEQ ID NO: 24793 - DNA, 40 bp, Artificial Sequence
  Description of Artificial Sequence: Synthetic primer
tataaacagtgttttaaccctcttcatcctgcatgcaaac

SEQ ID NO: 24794 - DNA, 40 bp, Artificial Sequence
  Description of Artificial Sequence: Synthetic primer
taagattccttttgatctaccggaatatacatgtacagag

SEQ ID NO: 24795 - DNA, 40 bp, Artificial Sequence
  Description of Artificial Sequence: Synthetic primer
attctcgacttcaaaggatacatgctgagattaaaaattc

SEQ ID NO: 24796 - DNA, 40 bp, Artificial Sequence
  Description of Artificial Sequence: Synthetic primer
ctgggtatgccgccagtgtgtctttgcgatcgccaccaag

SEQ ID NO: 24797 - DNA, 40 bp, Artificial Sequence
  Description of Artificial Sequence: Synthetic primer
gagatgtaactagtttggccctttaagatccagcatactc

SEQ ID NO: 24798 - DNA, 40 bp, Artificial Sequence
  Description of Artificial Sequence: Synthetic primer
cccaggtatgcaagaagtgttgccatcttatcaaaaggtc

SEQ ID NO: 24799 - DNA, 40 bp, Artificial Sequence
  Description of Artificial Sequence: Synthetic primer
tgcatgatgcgatgcatgaaaccctttgccctggtgtaac

SEQ ID NO: 24800 - DNA, 40 bp, Artificial Sequence
  Description of Artificial Sequence: Synthetic primer
gttggaaataagtcctatagtttcttaattgtcttcatgc

SEQ ID NO: 24801 - DNA, 40 bp, Artificial Sequence
  Description of Artificial Sequence: Synthetic primer
atcactccataagtgatcctaaaaggtagcctcttcatag

SEQ ID NO: 24802 - DNA, 40 bp, Artificial Sequence
  Description of Artificial Sequence: Synthetic primer
agtgcgagtgcagccctggctggaatggcgaacactgcac

SEQ ID NO: 24803 - DNA, 40 bp, Artificial Sequence
  Description of Artificial Sequence: Synthetic primer
ggtctatctcgtttaaatttcttgctgtcattcccattag

SEQ ID NO: 24804 - DNA, 40 bp, Artificial Sequence
  Description of Artificial Sequence: Synthetic primer
gtgattattttggagaaggaaaaataaggtgtggaattag

SEQ ID NO: 24805 - DNA, 40 bp, Artificial Sequence
  Description of Artificial Sequence: Synthetic primer
ccctgcttgaagatcagaagttccaatgctggattacgtc

SEQ ID NO: 24806 - DNA, 40 bp, Artificial Sequence
  Description of Artificial Sequence: Synthetic primer
actttaaaatccaaagcctagacaaggaaaagtgttagac

SEQ ID NO: 24807 - DNA, 40 bp, Artificial Sequence
  Description of Artificial Sequence: Synthetic primer
ggcactttgatctgggctgatttgggcgtagctgttttcc

SEQ ID NO: 24808 - DNA, 40 bp, Artificial Sequence
  Description of Artificial Sequence: Synthetic primer
ggcctgtgtgcaggaagtacctgacccagcagtcgttttc

SEQ ID NO: 24809 - DNA, 40 bp, Artificial Sequence
  Description of Artificial Sequence: Synthetic primer
ttcttcacaataaggtcagctgttaccggctgccagagaa

SEQ ID NO: 24810 - DNA, 40 bp, Artificial Sequence
  Description of Artificial Sequence: Synthetic primer
aatccagtacttcaacaacaaggtcgtctgtgacctcatc

SEQ ID NO: 24811 - DNA, 40 bp, Artificial Sequence
  Description of Artificial Sequence: Synthetic primer
ttcgtagaagatcctctatttctttcttggaaagctgttg

SEQ ID NO: 24812 - DNA, 40 bp, Artificial Sequence
  Description of Artificial Sequence: Synthetic primer
tggatcttttgtagttacgtgttttgattagtcctgtcac

SEQ ID NO: 24813 - DNA, 40 bp, Artificial Sequence
  Description of Artificial Sequence: Synthetic primer
ttcaagatttaagtgcaagtgtcttctttccaccttgttc

SEQ ID NO: 24814 - DNA, 40 bp, Artificial Sequence
  Description of Artificial Sequence: Synthetic primer
tcggaacagacctgaataggaactttgcttccaaacactg

SEQ ID NO: 24815 - DNA, 40 bp, Artificial Sequence
  Description of Artificial Sequence: Synthetic primer
agaagctctggggttcccttcaagtgcacgaggggttagg

SEQ ID NO: 24816 - DNA, 40 bp, Artificial Sequence
  Description of Artificial Sequence: Synthetic primer
tgcgtctctgtctctgatgccgagtgacttgtcccccttc

SEQ ID NO: 24817 - DNA, 40 bp, Artificial Sequence
  Description of Artificial Sequence: Synthetic primer
aaagatataatccttctaaaacttcaaatgggcaccagtc

SEQ ID NO: 24818 - DNA, 40 bp, Artificial Sequence
  Description of Artificial Sequence: Synthetic primer
ctttcatgcaaattcagatgaaaaggtctttacctcaagc

SEQ ID NO: 24819 - DNA, 40 bp, Artificial Sequence
  Description of Artificial Sequence: Synthetic primer
ggcatcagcttctggtgatgtgagctgtgtggatgaaatc

SEQ ID NO: 24820 - DNA, 40 bp, Artificial Sequence
  Description of Artificial Sequence: Synthetic primer
tcccagctgacaccctgcaaggccaccgggaccgcttcat

SEQ ID NO: 24821 - DNA, 40 bp, Artificial Sequence
  Description of Artificial Sequence: Synthetic primer
aggcctgctgcagctgggctaggttggggctgtccttatc

SEQ ID NO: 24822 - DNA, 40 bp, Artificial Sequence
  Description of Artificial Sequence: Synthetic primer
cacaacttgagcctgactgtacatctcttggatttgtttc

SEQ ID NO: 24823 - DNA, 40 bp, Artificial Sequence
  Description of Artificial Sequence: Synthetic primer
ccaccaccttccctccgcttctctcgcctcttcctcctac

SEQ ID NO: 24824 - DNA, 40 bp, Artificial Sequence
  Description of Artificial Sequence: Synthetic primer
gcagagactgcccagaatgacgaccacgacgctgatgatg

SEQ ID NO: 24825 - DNA, 40 bp, Artificial Sequence
  Description of Artificial Sequence: Synthetic primer
gaacagcattcctgggaactgctgctctgccctgttcaag

SEQ ID NO: 24826 - DNA, 40 bp, Artificial Sequence
  Description of Artificial Sequence: Synthetic primer
agaattccctctacactggcagttccacctgtctgtcatc

SEQ ID NO: 24827 - DNA, 40 bp, Artificial Sequence
  Description of Artificial Sequence: Synthetic primer
aagataaacaataagaatacttaataggtttgatggtctc

SEQ ID NO: 24828 - DNA, 40 bp, Artificial Sequence
  Description of Artificial Sequence: Synthetic primer
cgtccattacatcgagccttgttttaaagggatcctcgtc

SEQ ID NO: 24829 - DNA, 40 bp, Artificial Sequence
  Description of Artificial Sequence: Synthetic primer
aaaggtttgaaaactgagtataggatttatggcagacctc

SEQ ID NO: 24830 - DNA, 40 bp, Artificial Sequence
  Description of Artificial Sequence: Synthetic primer
gagtggcttcaatggggtgtcaagagtaagcatggagagc

SEQ ID NO: 24831 - DNA, 40 bp, Artificial Sequence
  Description of Artificial Sequence: Synthetic primer
gcgaggacaaaagagacgatggggagcaggtagccaaatg

SEQ ID NO: 24832 - DNA, 40 bp, Artificial Sequence
  Description of Artificial Sequence: Synthetic primer
tccagcagttggcattaaagtgcctttttctaataaaatc

SEQ ID NO: 24833 - DNA, 40 bp, Artificial Sequence
  Description of Artificial Sequence: Synthetic primer
gactgggaggggccatggggtgggctgggaccagagactg

SEQ ID NO: 24834 - DNA, 40 bp, Artificial Sequence
  Description of Artificial Sequence: Synthetic primer
gaactgcagtttctctggcttgttgcatagataacaactt

SEQ ID NO: 24835 - DNA, 40 bp, Artificial Sequence
  Description of Artificial Sequence: Synthetic primer
ttgacaaagtcatgatcacactaactataggtttagaaat

SEQ ID NO: 24836 - DNA, 40 bp, Artificial Sequence
  Description of Artificial Sequence: Synthetic primer
tttaaaacattgttttctagaatgaaaatcacaaagattc

SEQ ID NO: 24837 - DNA, 40 bp, Artificial Sequence
  Description of Artificial Sequence: Synthetic primer
gatgactacattgcaattggagctgatgaggaagaattag

SEQ ID NO: 24838 - DNA, 40 bp, Artificial Sequence
  Description of Artificial Sequence: Synthetic primer
ccatggagctgccggattatgtacttctaacagctactgc

SEQ ID NO: 24839 - DNA, 40 bp, Artificial Sequence
  Description of Artificial Sequence: Synthetic primer
acacgaagttgctggaagaaaatgagacagaagcagtgac

SEQ ID NO: 24840 - DNA, 40 bp, Artificial Sequence
  Description of Artificial Sequence: Synthetic primer
ataaaatgagtaacaattaaaagtggtattgaaaacaatg

SEQ ID NO: 24841 - DNA, 40 bp, Artificial Sequence
  Description of Artificial Sequence: Synthetic primer
gacaggcccactcctcctgagaaaagtctatggctacgtc

SEQ ID NO: 24842 - DNA, 40 bp, Artificial Sequence
  Description of Artificial Sequence: Synthetic primer
cttaaatctcatgcaggcaagtcgtctggtggggttaaag

SEQ ID NO: 24843 - DNA, 40 bp, Artificial Sequence
  Description of Artificial Sequence: Synthetic primer
aggggtgaaacactgcagctaattcctttataatactttc

SEQ ID NO: 24844 - DNA, 40 bp, Artificial Sequence
  Description of Artificial Sequence: Synthetic primer
ctctgaggtgggagaggacgcgctggtccccaggtggttc

SEQ ID NO: 24845 - DNA, 40 bp, Artificial Sequence
  Description of Artificial Sequence: Synthetic primer
cgtggagaagaggaaggactgacgcctcttcatggtcatc

SEQ ID NO: 24846 - DNA, 40 bp, Artificial Sequence
  Description of Artificial Sequence: Synthetic primer
cgcgggcagcggggacggcatgcccgagaagaggctcacc

SEQ ID NO: 24847 - DNA, 40 bp, Artificial Sequence
  Description of Artificial Sequence: Synthetic primer
ttatgatgtttatctgaataatctggacaaattctcattc

SEQ ID NO: 24848 - DNA, 40 bp, Artificial Sequence
  Description of Artificial Sequence: Synthetic primer
accactgtggatcatggggccttccttctccacgaagagc

SEQ ID NO: 24849 - DNA, 40 bp, Artificial Sequence
  Description of Artificial Sequence: Synthetic primer
cagttcaattgttaaagtatgaaaaagggaaaaattaaag

SEQ ID NO: 24850 - DNA, 40 bp, Artificial Sequence
  Description of Artificial Sequence: Synthetic primer
gctccagagagacgtgaaacatgtgaacactcaagtgaag

SEQ ID NO: 24851 - DNA, 40 bp, Artificial Sequence
  Description of Artificial Sequence: Synthetic primer
cacttatgcagcttcagcttccccgtggcgtcctccacac

SEQ ID NO: 24852 - DNA, 40 bp, Artificial Sequence
  Description of Artificial Sequence: Synthetic primer
cagctgtcgaagcagactgtggccattgctgaactcacag

SEQ ID NO: 24853 - DNA, 40 bp, Artificial Sequence
  Description of Artificial Sequence: Synthetic primer
aacactggcacactgctcttaagaaactatgaagatctga

SEQ ID NO: 24854 - DNA, 40 bp, Artificial Sequence
  Description of Artificial Sequence: Synthetic primer
acagggagcaggaagtgggaagatccttgctggggaagtc

SEQ ID NO: 24855 - DNA, 40 bp, Artificial Sequence
  Description of Artificial Sequence: Synthetic primer
ggttctcgtggtcttcctggagctgatggcagagctggcg

SEQ ID NO: 24856 - DNA, 40 bp, Artificial Sequence
  Description of Artificial Sequence: Synthetic primer
ccgactctcaccatcatcaagacggaaaaagtcgatctgg

SEQ ID NO: 24857 - DNA, 40 bp, Artificial Sequence
  Description of Artificial Sequence: Synthetic primer
ccagctgaagggagcactggcgacttcgctcttccagttg

SEQ ID NO: 24858 - DNA, 40 bp, Artificial Sequence
  Description of Artificial Sequence: Synthetic primer
tccgtatcagatcctgggcccgaccagcagtcgcctagcc

SEQ ID NO: 24859 - DNA, 40 bp, Artificial Sequence
  Description of Artificial Sequence: Synthetic primer
ggggggaccctggtcgccattgaaagtgaggtggagcaag

SEQ ID NO: 24860 - DNA, 40 bp, Artificial Sequence
  Description of Artificial Sequence: Synthetic primer
tccatggtgagtttggtctccctggtcctgctggtccaag

SEQ ID NO: 24861 - DNA, 40 bp, Artificial Sequence
  Description of Artificial Sequence: Synthetic primer
gttttttctaattccctaaaattgtgtgggtggagtggag

SEQ ID NO: 24862 - DNA, 40 bp, Artificial Sequence
  Description of Artificial Sequence: Synthetic primer
tctctgtctctcttacagacacatatggacacattcacag

SEQ ID NO: 24863 - DNA, 40 bp, Artificial Sequence
  Description of Artificial Sequence: Synthetic primer
gggcctcgtgttcatcaagacacccctctgcccagctcac

SEQ ID NO: 24864 - DNA, 40 bp, Artificial Sequence
  Description of Artificial Sequence: Synthetic primer
caagtccttgcacaaagattgtgttgttatctgaattatc

SEQ ID NO: 24865 - DNA, 40 bp, Artificial Sequence
  Description of Artificial Sequence: Synthetic primer
ctggggttttattttctctcagctgcaacaacttcaatgc

SEQ ID NO: 24866 - DNA, 40 bp, Artificial Sequence
  Description of Artificial Sequence: Synthetic primer
cgggcgagcccactgtgcggccgtcgtgggggaagcgaag

SEQ ID NO: 24867 - DNA, 40 bp, Artificial Sequence
  Description of Artificial Sequence: Synthetic primer
ccggaatggggagagaatggggaccattaaatttactcaa

SEQ ID NO: 24868 - DNA, 40 bp, Artificial Sequence
  Description of Artificial Sequence: Synthetic primer
tcttgtaaatgtgttggacaaatgtgaagatgcattgtag

SEQ ID NO: 24869 - DNA, 40 bp, Artificial Sequence
  Description of Artificial Sequence: Synthetic primer
agcaaaaaatgaattctcatcaaaatgcaaaggaaatgac

SEQ ID NO: 24870 - DNA, 40 bp, Artificial Sequence
  Description of Artificial Sequence: Synthetic primer
gagcaagcattggttaagtctgtgtatactgagttggaag

SEQ ID NO: 24871 - DNA, 40 bp, Artificial Sequence
  Description of Artificial Sequence: Synthetic primer
tatcaaaaatggctctccagaaattaagctgaaaatcacc

SEQ ID NO: 24872 - DNA, 40 bp, Artificial Sequence
  Description of Artificial Sequence: Synthetic primer
ttaatatgaaaatatggaggaaaaatgtcttattctgaag

SEQ ID NO: 24873 - DNA, 40 bp, Artificial Sequence
  Description of Artificial Sequence: Synthetic primer
ccaacagtcagaattcatacgtcccatacaatatgctgct

SEQ ID NO: 24874 - DNA, 40 bp, Artificial Sequence
  Description of Artificial Sequence: Synthetic primer
cggttccaccaggcacagcagcctaggggaccacaagtcc

SEQ ID NO: 24875 - DNA, 40 bp, Artificial Sequence
  Description of Artificial Sequence: Synthetic primer
cctacagcaagcagagggcagccattgaacgggagtatgg

SEQ ID NO: 24876 - DNA, 40 bp, Artificial Sequence
  Description of Artificial Sequence: Synthetic primer
ccgctgtccaggctctgtccctccctccacgtcttctctc

SEQ ID NO: 24877 - DNA, 40 bp, Artificial Sequence
  Description of Artificial Sequence: Synthetic primer
cccccgatgccttgctctctgatttatttcttgctgttgc

SEQ ID NO: 24878 - DNA, 40 bp, Artificial Sequence
  Description of Artificial Sequence: Synthetic primer
gctataagcagaatgatgtcgtccgaattctcccctgcaa

SEQ ID NO: 24879 - DNA, 40 bp, Artificial Sequence
  Description of Artificial Sequence: Synthetic primer
tttggtcaagtcccagatgcatttgccttatattacattc

SEQ ID NO: 24880 - DNA, 40 bp, Artificial Sequence
  Description of Artificial Sequence: Synthetic primer
tacagtgacattcaagaagcaataccatcgggaggaagac

SEQ ID NO: 24881 - DNA, 40 bp, Artificial Sequence
  Description of Artificial Sequence: Synthetic primer
gaatctggtggaagctgccgaggaggccgacctgaaccac

SEQ ID NO: 24882 - DNA, 40 bp, Artificial Sequence
  Description of Artificial Sequence: Synthetic primer
gggcctcatggtgactctcgctcaccattttaggttcagg

SEQ ID NO: 24883 - DNA, 40 bp, Artificial Sequence
  Description of Artificial Sequence: Synthetic primer
gggccaagatgtggacgagctgagcttcaacgtgaacgag

SEQ ID NO: 24884 - DNA, 40 bp, Artificial Sequence
  Description of Artificial Sequence: Synthetic primer
ctggttgctccaagggagaatccgctctctgaggctcttg

SEQ ID NO: 24885 - DNA, 40 bp, Artificial Sequence
  Description of Artificial Sequence: Synthetic primer
gctgcctgtgaccgggtaggaggagacgagggagcccaac

SEQ ID NO: 24886 - DNA, 40 bp, Artificial Sequence
  Description of Artificial Sequence: Synthetic primer
cgcccacctggccaaccccgtgctgcccgacgaagtgctg

SEQ ID NO: 24887 - DNA, 40 bp, Artificial Sequence
  Description of Artificial Sequence: Synthetic primer
tctgcattctgtcaggcacccgtagaaagacctcagtaca

SEQ ID NO: 24888 - DNA, 40 bp, Artificial Sequence
  Description of Artificial Sequence: Synthetic primer
aaagggggggtaaaaagaaagaaaagcaattctatgaacg

SEQ ID NO: 24889 - DNA, 40 bp, Artificial Sequence
  Description of Artificial Sequence: Synthetic primer
gatgtcccacgacagcggcaaacgcttcgaatgtgaaaac

SEQ ID NO: 24890 - DNA, 40 bp, Artificial Sequence
  Description of Artificial Sequence: Synthetic primer
aattgccctcatctacacaacccatacaattggatctcag

SEQ ID NO: 24891 - DNA, 40 bp, Artificial Sequence
  Description of Artificial Sequence: Synthetic primer
cttaggagaagagggaaacagaaagaaaaaggatataggc

SEQ ID NO: 24892 - DNA, 40 bp, Artificial Sequence
  Description of Artificial Sequence: Synthetic primer
ctggtcacaatgcagcaaggtgaagacacaagtctattgg

SEQ ID NO: 24893 - DNA, 40 bp, Artificial Sequence
  Description of Artificial Sequence: Synthetic primer
cctccgagcacacggtgatcctcgcagtggtttcgcgagt

SEQ ID NO: 24894 - DNA, 40 bp, Artificial Sequence
  Description of Artificial Sequence: Synthetic primer
aaatccagtgttctgccacttctaggtttatttcatcctc

SEQ ID NO: 24895 - DNA, 40 bp, Artificial Sequence
  Description of Artificial Sequence: Synthetic primer
catattccagggatacttcatagaaatgctgccggaccag

SEQ ID NO: 24896 - DNA, 40 bp, Artificial Sequence
  Description of Artificial Sequence: Synthetic primer
gcatacttgaagaatgtaatactcaaactctcagtgcttc

SEQ ID NO: 24897 - DNA, 40 bp, Artificial Sequence
  Description of Artificial Sequence: Synthetic primer
cctcctctccagggacggaagccttcacttaggaggtagg

SEQ ID NO: 24898 - DNA, 40 bp, Artificial Sequence
  Description of Artificial Sequence: Synthetic primer
tctcagtctcagagggcagtggctcttgcttccagttagg

SEQ ID NO: 24899 - DNA, 40 bp, Artificial Sequence
  Description of Artificial Sequence: Synthetic primer
agacactcctaagccaccaactcctgggacaccaccaagc

SEQ ID NO: 24900 - DNA, 40 bp, Artificial Sequence
  Description of Artificial Sequence: Synthetic primer
ccagaaccgctgccaccaccgccacgccctccgcagaaag

SEQ ID NO: 24901 - DNA, 40 bp, Artificial Sequence
  Description of Artificial Sequence: Synthetic primer
agccgcctgaacctcgttctctcgcgagcgtttatttctc

SEQ ID NO: 24902 - DNA, 40 bp, Artificial Sequence
  Description of Artificial Sequence: Synthetic primer
gctctctgccaggagaccagacttgagggacatcattacc

SEQ ID NO: 24903 - DNA, 40 bp, Artificial Sequence
  Description of Artificial Sequence: Synthetic primer
gtacatcattacagcaatcaaagaagtactgaggattcac

SEQ ID NO: 24904 - DNA, 40 bp, Artificial Sequence
  Description of Artificial Sequence: Synthetic primer
tctgtgtggcagttcagaatgatggatcaagctagatcag

SEQ ID NO: 24905 - DNA, 40 bp, Artificial Sequence
  Description of Artificial Sequence: Synthetic primer
agtcaaagatcccttccaagaatgttcgtcacagaggaag

SEQ ID NO: 24906 - DNA, 40 bp, Artificial Sequence
  Description of Artificial Sequence: Synthetic primer
gggcggggggtaggcgctgcggttggggtagtaggagttg

SEQ ID NO: 24907 - DNA, 40 bp, Artificial Sequence
  Description of Artificial Sequence: Synthetic primer
ccacggagaggagcagcccccggagacagcggcacagagg

SEQ ID NO: 24908 - DNA, 40 bp, Artificial Sequence
  Description of Artificial Sequence: Synthetic primer
accggacagacaactagccacagtcggggaggatccaatg

SEQ ID NO: 24909 - DNA, 40 bp, Artificial Sequence
  Description of Artificial Sequence: Synthetic primer
ttctttgtaatgtaaagaaattcaaagttatcaaagttcc

SEQ ID NO: 24910 - DNA, 40 bp, Artificial Sequence
  Description of Artificial Sequence: Synthetic primer
aaaggtcaatggcatgaggtagagctggcagtatgaattg

SEQ ID NO: 24911 - DNA, 40 bp, Artificial Sequence
  Description of Artificial Sequence: Synthetic primer
ccacttgtgcatgcatgtgatgttctaataccaattgaag

SEQ ID NO: 24912 - DNA, 40 bp, Artificial Sequence
  Description of Artificial Sequence: Synthetic primer
cagcatttctttgatgttaacaaagccattaaaaatgaac

SEQ ID NO: 24913 - DNA, 40 bp, Artificial Sequence
  Description of Artificial Sequence: Synthetic primer
actttgtggattctgctgggagcagccccgtcccttactc

SEQ ID NO: 24914 - DNA, 40 bp, Artificial Sequence
  Description of Artificial Sequence: Synthetic primer
tcccagttgtgacccatttaacacaagtgttcccgaagag

SEQ ID NO: 24915 - DNA, 40 bp, Artificial Sequence
  Description of Artificial Sequence: Synthetic primer
gcctttgtgtctgatatcaagtgatcaaaacttttccttg

SEQ ID NO: 24916 - DNA, 40 bp, Artificial Sequence
  Description of Artificial Sequence: Synthetic primer
ctccaagaccgttcagaccctcggcagcctgtccaagtcc

SEQ ID NO: 24917 - DNA, 40 bp, Artificial Sequence
  Description of Artificial Sequence: Synthetic primer
tattaagtctacacttagagtaatgcttttactgattttt

SEQ ID NO: 24918 - DNA, 40 bp, Artificial Sequence
  Description of Artificial Sequence: Synthetic primer
ccaagggcacagtgttgttgatgatttctccagtgctttc

SEQ ID NO: 24919 - DNA, 40 bp, Artificial Sequence
  Description of Artificial Sequence: Synthetic primer
cctccagcgccacagtcaaggacacgaggtcaccatctcc

SEQ ID NO: 24920 - DNA, 40 bp, Artificial Sequence
  Description of Artificial Sequence: Synthetic primer
gtccagtttcggaagataataaatgtttgttagatacacc

SEQ ID NO: 24921 - DNA, 40 bp, Artificial Sequence
  Description of Artificial Sequence: Synthetic primer
cttgcagttggtccttgaggttagcaatatactcattctg

SEQ ID NO: 24922 - DNA, 40 bp, Artificial Sequence
  Description of Artificial Sequence: Synthetic primer
agcagccactctaggcagcagagtcccgtcaacccagacc

SEQ ID NO: 24923 - DNA, 40 bp, Artificial Sequence
  Description of Artificial Sequence: Synthetic primer
gtgctgggtgacagagccatgagccagccattttataagc

SEQ ID NO: 24924 - DNA, 40 bp, Artificial Sequence
  Description of Artificial Sequence: Synthetic primer
agctccgccctcacaccaaagttcttcctcatactgagac

SEQ ID NO: 24925 - DNA, 40 bp, Artificial Sequence
  Description of Artificial Sequence: Synthetic primer
cgatgggtcccaccgctggcggctcgcgtcctggcctctg

SEQ ID NO: 24926 - DNA, 40 bp, Artificial Sequence
  Description of Artificial Sequence: Synthetic primer
caggagcccggctctctacacacactgcgagtccctcggc

SEQ ID NO: 24927 - DNA, 40 bp, Artificial Sequence
  Description of Artificial Sequence: Synthetic primer
gtttctggacaaaaacaatgaccttctcttccggaacctt

SEQ ID NO: 24928 - DNA, 40 bp, Artificial Sequence
  Description of Artificial Sequence: Synthetic primer
acctcccagaacctgcagctggagaacctgcgcatgaagc

SEQ ID NO: 24929 - DNA, 40 bp, Artificial Sequence
  Description of Artificial Sequence: Synthetic primer
atcctgaaggaactgaggcgggtgcagaaacagctggaag

SEQ ID NO: 24930 - DNA, 40 bp, Artificial Sequence
  Description of Artificial Sequence: Synthetic primer
acatcggccgcagatggggagatggcatgctccagcaggc

SEQ ID NO: 24931 - DNA, 40 bp, Artificial Sequence
  Description of Artificial Sequence: Synthetic primer
ctggtcggcaaagagggttccgcggtacggccctgcagac

SEQ ID NO: 24932 - DNA, 40 bp, Artificial Sequence
  Description of Artificial Sequence: Synthetic primer
tcctctttttcagagcatagtctaccacccactcattctc

SEQ ID NO: 24933 - DNA, 40 bp, Artificial Sequence
  Description of Artificial Sequence: Synthetic primer
atttgatgctaataataattttctttaaactctaccattc

SEQ ID NO: 24934 - DNA, 40 bp, Artificial Sequence
  Description of Artificial Sequence: Synthetic primer
ggcggcgagggtcttcagcagtcgggagaggcccttgacg

SEQ ID NO: 24935 - DNA, 40 bp, Artificial Sequence
  Description of Artificial Sequence: Synthetic primer
agcaaagcacatctcaccaagctgaaaataccttcccaac

SEQ ID NO: 24936 - DNA, 40 bp, Artificial Sequence
  Description of Artificial Sequence: Synthetic primer
ccgtggtggcctcctcccacaagggcaagaaagacacaag

SEQ ID NO: 24937 - DNA, 40 bp, Artificial Sequence
  Description of Artificial Sequence: Synthetic primer
aatgctgtaacagctacttcttatcaaggaataaagacag

SEQ ID NO: 24938 - DNA, 40 bp, Artificial Sequence
  Description of Artificial Sequence: Synthetic primer
aggagtatctctacttgcaccagtgcataagccgaagagc

SEQ ID NO: 24939 - DNA, 40 bp, Artificial Sequence
  Description of Artificial Sequence: Synthetic primer
tgtccaaacaggaattttagttttccttgaaactgcatcg

SEQ ID NO: 24940 - DNA, 40 bp, Artificial Sequence
  Description of Artificial Sequence: Synthetic primer
gggtccaatgtgggcagaaacctggccagtcccagcagtc

SEQ ID NO: 24941 - DNA, 40 bp, Artificial Sequence
  Description of Artificial Sequence: Synthetic primer
gacactgctcaccactgtggccatgccagtcttcagcaag

SEQ ID NO: 24942 - DNA, 40 bp, Artificial Sequence
  Description of Artificial Sequence: Synthetic primer
ggatactgtccccgattagaaccagcaggctcctctgtgg

SEQ ID NO: 24943 - DNA, 40 bp, Artificial Sequence
  Description of Artificial Sequence: Synthetic primer
ttctgcttttaaactgtaacatagttgaagatttcttttt

SEQ ID NO: 24944 - DNA, 40 bp, Artificial Sequence
  Description of Artificial Sequence: Synthetic primer
gagacagaaggcagccgaggggctgtcaaagctccaactg

SEQ ID NO: 24945 - DNA, 40 bp, Artificial Sequence
  Description of Artificial Sequence: Synthetic primer
agtaagggtctgactgaagcatctgagctgcctggacaag

SEQ ID NO: 24946 - DNA, 40 bp, Artificial Sequence
  Description of Artificial Sequence: Synthetic primer
ggcaggggggtcttgctcctttttcatatcaggtgactct

SEQ ID NO: 24947 - DNA, 40 bp, Artificial Sequence
  Description of Artificial Sequence: Synthetic primer
acccggacaggcagccaagaaagaaacgaaggaacctaag

SEQ ID NO: 24948 - DNA, 40 bp, Artificial Sequence
  Description of Artificial Sequence: Synthetic primer
agacccggcgggaccttccggaccttcttgggctgcgtgt

SEQ ID NO: 24949 - DNA, 40 bp, Artificial Sequence
  Description of Artificial Sequence: Synthetic primer
ccccaccagcaaacccgagggctttcactgcacccagaac

SEQ ID NO: 24950 - DNA, 40 bp, Artificial Sequence
  Description of Artificial Sequence: Synthetic primer
gagcccggattccggttgaatctctttaccaccgatgaag

SEQ ID NO: 24951 - DNA, 40 bp, Artificial Sequence
  Description of Artificial Sequence: Synthetic primer
agtacttctaatatactgagggaagtataatatgtggaac

SEQ ID NO: 24952 - DNA, 40 bp, Artificial Sequence
  Description of Artificial Sequence: Synthetic primer
ttcagcctaaattcatttttatgaataaatctcttctttc

SEQ ID NO: 24953 - DNA, 40 bp, Artificial Sequence
  Description of Artificial Sequence: Synthetic primer
gacacaggcctgggcgtcggagtcacggctccttgtgttc

SEQ ID NO: 24954 - DNA, 40 bp, Artificial Sequence
  Description of Artificial Sequence: Synthetic primer
aagaatttctgagagctgtttggtggtgttatctcaagac

SEQ ID NO: 24955 - DNA, 40 bp, Artificial Sequence
  Description of Artificial Sequence: Synthetic primer
catgttggtttgaaaaggatagggaatttagaaacagttc

SEQ ID NO: 24956 - DNA, 40 bp, Artificial Sequence
  Description of Artificial Sequence: Synthetic primer
tccatacctgtcgcttcggaaataggggaagttaaactgg

SEQ ID NO: 24957 - DNA, 40 bp, Artificial Sequence
  Description of Artificial Sequence: Synthetic primer
ccggcgggagctggcggagctcgtgaagcggaagcaggag

SEQ ID NO: 24958 - DNA, 40 bp, Artificial Sequence
  Description of Artificial Sequence: Synthetic primer
ccagcggcaactcgtgtccaacctggaaaagaagcagagg

SEQ ID NO: 24959 - DNA, 40 bp, Artificial Sequence
  Description of Artificial Sequence: Synthetic primer
cacccgaggcattatttgaccggatctacacccaccagag

SEQ ID NO: 24960 - DNA, 40 bp, Artificial Sequence
  Description of Artificial Sequence: Synthetic primer
cggccctgtacacgggctctgctctagactttgttcgtaa

SEQ ID NO: 24961 - DNA, 40 bp, Artificial Sequence
  Description of Artificial Sequence: Synthetic primer
ggttttggtgggccagttattagttctctatatcatgaag

SEQ ID NO: 24962 - DNA, 40 bp, Artificial Sequence
  Description of Artificial Sequence: Synthetic primer
aggcccatctcttctccctctcatattgggatctcattgg

SEQ ID NO: 24963 - DNA, 40 bp, Artificial Sequence
  Description of Artificial Sequence: Synthetic primer
tcctgctctgatgccaccaagtgctcaaaaagagcttctg

SEQ ID NO: 24964 - DNA, 40 bp, Artificial Sequence
  Description of Artificial Sequence: Synthetic primer
ggcgatgcagatgccggttatggtcagcactctcttctgg

SEQ ID NO: 24965 - DNA, 40 bp, Artificial Sequence
  Description of Artificial Sequence: Synthetic primer
caaaggatacaacatctatttccaggcgatgagcagtgtg

SEQ ID NO: 24966 - DNA, 40 bp, Artificial Sequence
  Description of Artificial Sequence: Synthetic primer
tgtagaggacgacgctgagggccacctcatctaccacgtc

SEQ ID NO: 24967 - DNA, 40 bp, Artificial Sequence
  Description of Artificial Sequence: Synthetic primer
ttgtgcatttccctccccaaggacgtgagtagtataaagc

SEQ ID NO: 24968 - DNA, 40 bp, Artificial Sequence
  Description of Artificial Sequence: Synthetic primer
cttttgactcacagctggaagttagaaaagcctcgatttc

SEQ ID NO: 24969 - DNA, 40 bp, Artificial Sequence
  Description of Artificial Sequence: Synthetic primer
ttgggctcagtatcattcctcaatgtgcccctatttctgg

SEQ ID NO: 24970 - DNA, 40 bp, Artificial Sequence
  Description of Artificial Sequence: Synthetic primer
atgaccgtttggatctcattcgtcgatctttgatagtatg

SEQ ID NO: 24971 - DNA, 40 bp, Artificial Sequence
  Description of Artificial Sequence: Synthetic primer
ccctgcatgccccagttgcccaccccgcctgcccctggac

SEQ ID NO: 24972 - DNA, 40 bp, Artificial Sequence
  Description of Artificial Sequence: Synthetic primer
cagctgaagggcaaactgcccagtgtaggagtccgtccag

SEQ ID NO: 24973 - DNA, 40 bp, Artificial Sequence
  Description of Artificial Sequence: Synthetic primer
ttccttctctctaattcgaagcaggtttctgtcgtcattg

SEQ ID NO: 24974 - DNA, 40 bp, Artificial Sequence
  Description of Artificial Sequence: Synthetic primer
ctttagaacaattgtagacattagcaatatgaataaaacc

SEQ ID NO: 24975 - DNA, 40 bp, Artificial Sequence
  Description of Artificial Sequence: Synthetic primer
ttccagcatctctgtgtcttccagcatcttcatgtcttcc

SEQ ID NO: 24976 - DNA, 40 bp, Artificial Sequence
  Description of Artificial Sequence: Synthetic primer
cctggataaaagactcctccaggaactccaccaggaatgg

SEQ ID NO: 24977 - DNA, 40 bp, Artificial Sequence
  Description of Artificial Sequence: Synthetic primer
aaaaaatccttgcagataaatcttagtttctttcagtctc

SEQ ID NO: 24978 - DNA, 40 bp, Artificial Sequence; identical to SEQ ID NO: 12373
  Description of Artificial Sequence: Synthetic primer

SEQ ID NO: 24979 - DNA, 40 bp, Artificial Sequence
  Description of Artificial Sequence: Synthetic primer
agcctgtggagacaacattcagtcttatactgccacagtc

SEQ ID NO: 24980 - DNA, 40 bp, Artificial Sequence
  Description of Artificial Sequence: Synthetic primer
ttaaagtcttaaacaaccatttttaaaagaaggaagaaaa

SEQ ID NO: 24981 - DNA, 40 bp, Artificial Sequence
  Description of Artificial Sequence: Synthetic primer
tggcggcgagagtgcccctactacactgacacaacaaacg

SEQ ID NO: 24982 - DNA, 40 bp, Artificial Sequence
  Description of Artificial Sequence: Synthetic primer
agacatgacacggtttgtttacatgatccaaatgaccatc

SEQ ID NO: 24983 - DNA, 40 bp, Artificial Sequence
  Description of Artificial Sequence: Synthetic primer
tgggccaagatctggtccaccactgccgtggcctccttcc

SEQ ID NO: 24984 - DNA, 40 bp, Artificial Sequence
  Description of Artificial Sequence: Synthetic primer
gacacttacttacgacccaactacagctgctatacagaac

SEQ ID NO: 24985 - DNA, 40 bp, Artificial Sequence
  Description of Artificial Sequence: Synthetic primer
ctctcctcccctccctcagagacaccaaactgccaaaaac

SEQ ID NO: 24986 - DNA, 40 bp, Artificial Sequence
  Description of Artificial Sequence: Synthetic primer
cgtggaggactacgagccggtgtttgagaagtataactgg

SEQ ID NO: 24987 - DNA, 40 bp, Artificial Sequence
  Description of Artificial Sequence: Synthetic primer
acttgtttagaaaggattcagttaaccaaacaagaaaaag

SEQ ID NO: 24988 - DNA, 40 bp, Artificial Sequence
  Description of Artificial Sequence: Synthetic primer
tacggaataaattgagtgctatccactgaggaaactacgg

SEQ ID NO: 24989 - DNA, 40 bp, Artificial Sequence
  Description of Artificial Sequence: Synthetic primer
atacgacatctagaaaagccaaatcctgtacttccttgtg

SEQ ID NO: 24990 - DNA, 40 bp, Artificial Sequence
  Description of Artificial Sequence: Synthetic primer
gatccacagtggttcggtggtgggagctggcctccctcag

SEQ ID NO: 24991 - DNA, 40 bp, Artificial Sequence
  Description of Artificial Sequence: Synthetic primer
ggccttcggcaacgccaagactgtgcgcaacaacaattcc

SEQ ID NO: 24992 - DNA, 40 bp, Artificial Sequence
  Description of Artificial Sequence: Synthetic primer
agcagctcctgccctgcggacctgacccagaagcgagagc

SEQ ID NO: 24993 - DNA, 40 bp, Artificial Sequence
  Description of Artificial Sequence: Synthetic primer
cttcaaaataattttcaagttttataccagcattggctac

SEQ ID NO: 24994 - DNA, 40 bp, Artificial Sequence
  Description of Artificial Sequence: Synthetic primer
atgccctggagagttcaggggactccaacaccccaaagac

SEQ ID NO: 24995 - DNA, 40 bp, Artificial Sequence
  Description of Artificial Sequence: Synthetic primer
ggagaccagttacttccacacaactacagttataaaacac

SEQ ID NO: 24996 - DNA, 40 bp, Artificial Sequence
  Description of Artificial Sequence: Synthetic primer
ttttccaggtgggaaataaataaagaaaatttggcttgtc

SEQ ID NO: 24997 - DNA, 40 bp, Artificial Sequence
  Description of Artificial Sequence: Synthetic primer
acgctgtctccagaaactccagctccatgtctgcctccag

SEQ ID NO: 24998 - DNA, 40 bp, Artificial Sequence
  Description of Artificial Sequence: Synthetic primer
ggagagctccccagctctcagcaacttcatataagcatgg

SEQ ID NO: 24999 - DNA, 40 bp, Artificial Sequence
  Description of Artificial Sequence: Synthetic primer
aatgatcaaaaatgtttaaatgtttcttcatagttaacac

SEQ ID NO: 25000 - DNA, 40 bp, Artificial Sequence
  Description of Artificial Sequence: Synthetic primer
catctacaggccacacttttactgtatttcttcatacttg

SEQ ID NO: 25001 - DNA, 40 bp, Artificial Sequence
  Description of Artificial Sequence: Synthetic primer
agatctggagaaaccaacagctgtgttgaagaaataatcc

SEQ ID NO: 25002 - DNA, 40 bp, Artificial Sequence
  Description of Artificial Sequence: Synthetic primer
aggggagcttcccggagaacctgagacaccttaagaacac

SEQ ID NO: 25003 - DNA, 40 bp, Artificial Sequence
  Description of Artificial Sequence: Synthetic primer
tgtaaaacatgcagctcctgtcgagatcaaggcaaaaatg

SEQ ID NO: 25004 - DNA, 40 bp, Artificial Sequence
  Description of Artificial Sequence: Synthetic primer
aggcacgagtgcatataatgttggtaaatctcttcatatc

SEQ ID NO: 25005 - DNA, 40 bp, Artificial Sequence
  Description of Artificial Sequence: Synthetic primer
tactttcttaaacacaataagcttaaaaagatgactatgg

SEQ ID NO: 25006 - DNA, 40 bp, Artificial Sequence
  Description of Artificial Sequence: Synthetic primer
ttatttcttcagttccaattaattcagggaaaagatcaag

SEQ ID NO: 25007 - DNA, 40 bp, Artificial Sequence
  Description of Artificial Sequence: Synthetic primer
gcattcatgcaagatatctaactccttgatataataatgc

SEQ ID NO: 25008 - DNA, 40 bp, Artificial Sequence
  Description of Artificial Sequence: Synthetic primer
aaaagctgtggagtccttgatggcagcaaatgaagaaaag

SEQ ID NO: 25009 - DNA, 40 bp, Artificial Sequence
  Description of Artificial Sequence: Synthetic primer
tggtgccgaaaccagtgtcgccctggagaagtaccaggag

SEQ ID NO: 25010 - DNA, 40 bp, Artificial Sequence
  Description of Artificial Sequence: Synthetic primer
aaaataaagcctcttgaaaacaactgaaaaggtatgtaac

SEQ ID NO: 25011 - DNA, 40 bp, Artificial Sequence
  Description of Artificial Sequence: Synthetic primer
cctcggtaccctggaggtccaaggcccccattgaggatac

SEQ ID NO: 25012 - DNA, 40 bp, Artificial Sequence
  Description of Artificial Sequence: Synthetic primer
aaagacattaatattcaaatctttacaagtttatctgacg

SEQ ID NO: 25013 - DNA, 40 bp, Artificial Sequence
  Description of Artificial Sequence: Synthetic primer
ccggggcagaactacccgcgtagcgggttcccgctggaag

SEQ ID NO: 25014 - DNA, 40 bp, Artificial Sequence
  Description of Artificial Sequence: Synthetic primer
tgatggaaaggatcttgggtcctatcccttcccggatgat

SEQ ID NO: 25015 - DNA, 40 bp, Artificial Sequence
  Description of Artificial Sequence: Synthetic primer
cattgtggaaaaggaccagctgattgtgcaatactttaac

SEQ ID NO: 25016 - DNA, 40 bp, Artificial Sequence
  Description of Artificial Sequence: Synthetic primer
attagtccagaaagcattagagcaagctttttctctcgtc

SEQ ID NO: 25017 - DNA, 40 bp, Artificial Sequence
  Description of Artificial Sequence: Synthetic primer
ggcctccatgtgggatagtcttggagaggagcaaaaacag

SEQ ID NO: 25018 - DNA, 40 bp, Artificial Sequence
  Description of Artificial Sequence: Synthetic primer
acatttttttctttacacataaagcacaaaaagatttaga

SEQ ID NO: 25019 - DNA, 40 bp, Artificial Sequence
  Description of Artificial Sequence: Synthetic primer
gaagaaatacacgaagcagcccatgaaggcagagtagagg

SEQ ID NO: 25020 - DNA, 40 bp, Artificial Sequence
  Description of Artificial Sequence: Synthetic primer
gctcagtgaggctcggctgtcccagagggacctctctcca

SEQ ID NO: 25021 - DNA, 40 bp, Artificial Sequence
  Description of Artificial Sequence: Synthetic primer
ctgctaaaagcacgtggcccttcagggtgacctgtatgag

SEQ ID NO: 25022 - DNA, 40 bp, Artificial Sequence
  Description of Artificial Sequence: Synthetic primer
ccatacaggcttgcacatagagtgtgctaaaaatggtaac

SEQ ID NO: 25023 - DNA, 40 bp, Artificial Sequence
  Description of Artificial Sequence: Synthetic primer
atttagatgttaaagactcgtaaaggtttcacactactgg

SEQ ID NO: 25024 - DNA, 40 bp, Artificial Sequence
  Description of Artificial Sequence: Synthetic primer
ccggtagggattgacagagaccaggacggggccaatgtag

SEQ ID NO: 25025 - DNA, 40 bp, Artificial Sequence
  Description of Artificial Sequence: Synthetic primer
cgcaaagatattcgccaggagtatcgagaggactttgtgc

SEQ ID NO: 25026 - DNA, 40 bp, Artificial Sequence
  Description of Artificial Sequence: Synthetic primer
ttcttctaaaattagtcctagttcttccttgagtttttcc

SEQ ID NO: 25027 - DNA, 40 bp, Artificial Sequence
  Description of Artificial Sequence: Synthetic primer
tacagcaatcccagtgaccacagccacaatgatccccatc

SEQ ID NO: 25028 - DNA, 40 bp, Artificial Sequence
  Description of Artificial Sequence: Synthetic primer
ggaaaatagtctccacaaaggcaattttggataagacaac

SEQ ID NO: 25029 - DNA, 40 bp, Artificial Sequence
  Description of Artificial Sequence: Synthetic primer
tactgaggttcccagcagtacagtagaaaagtcaaatcag

SEQ ID NO: 25030 - DNA, 40 bp, Artificial Sequence
  Description of Artificial Sequence: Synthetic primer
tgccccaggtgcgagatgtacacctgttgccgagagtctg

SEQ ID NO: 25031 - DNA, 40 bp, Artificial Sequence
  Description of Artificial Sequence: Synthetic primer
gaggctgtttcggggtgggaaagggttgcttttcctttgg

SEQ ID NO: 25032 - DNA, 40 bp, Artificial Sequence
  Description of Artificial Sequence: Synthetic primer
gaactccactctctccaagtatcaggcccctttgaaggac

SEQ ID NO: 25033 - DNA, 40 bp, Artificial Sequence
  Description of Artificial Sequence: Synthetic primer
cttgtaagagcttgttctggccgttttgtcagtgattgtg

SEQ ID NO: 25034 - DNA, 40 bp, Artificial Sequence
  Description of Artificial Sequence: Synthetic primer
ggccctggggctaggtctgtcccgagggcaccgcatgctc

SEQ ID NO: 25035 - DNA, 40 bp, Artificial Sequence
  Description of Artificial Sequence: Synthetic primer
actaccagtctgaatgtcattttcctcttttccatcattg

SEQ ID NO: 25036 - DNA, 40 bp, Artificial Sequence
  Description of Artificial Sequence: Synthetic primer
ggcttctggaaagtgtcccggacgggctgcgggcgcctct

SEQ ID NO: 25037 - DNA, 40 bp, Artificial Sequence
  Description of Artificial Sequence: Synthetic primer
ctgaaggccagttttgaagtgagtgacatttccaagctac

SEQ ID NO: 25038 - DNA, 40 bp, Artificial Sequence
  Description of Artificial Sequence: Synthetic primer
gcctacagtcagaaaaccatcgcctgcgaatgaagatcac

SEQ ID NO: 25039 - DNA, 40 bp, Artificial Sequence
  Description of Artificial Sequence: Synthetic primer
tgtgtttccaaccagtctcggtgcgaggcctcaccaaacc

SEQ ID NO: 25040 - DNA, 40 bp, Artificial Sequence
  Description of Artificial Sequence: Synthetic primer
caaattttcaataaatttctgcttgtgcctttagaaatac

SEQ ID NO: 25041 - DNA, 40 bp, Artificial Sequence
  Description of Artificial Sequence: Synthetic primer
gtttgagaagtggggagaagaagaagcagaactgaataag

SEQ ID NO: 25042 - DNA, 40 bp, Artificial Sequence
  Description of Artificial Sequence: Synthetic primer
ggaggagatctgtggggctgtggtgtctgtccgctttcag

SEQ ID NO: 25043 - DNA, 40 bp, Artificial Sequence
  Description of Artificial Sequence: Synthetic primer
gctggagagacaggcggtggatcagataaagagccaggag

SEQ ID NO: 25044 - DNA, 40 bp, Artificial Sequence
  Description of Artificial Sequence: Synthetic primer
ctgggctaaatggaacaacaggacccaaaggcatcagagg

SEQ ID NO: 25045 - DNA, 40 bp, Artificial Sequence
  Description of Artificial Sequence: Synthetic primer
agagaagccaacggagttattgggtccttcattcataccc

SEQ ID NO: 25046 - DNA, 40 bp, Artificial Sequence
  Description of Artificial Sequence: Synthetic primer
atggaggattctgaggaataaccttgatgttctcgtttac

SEQ ID NO: 25047 - DNA, 40 bp, Artificial Sequence
  Description of Artificial Sequence: Synthetic primer
gcacgccagaccatgcactccctcctggacgacgcctttg

SEQ ID NO: 25048 - DNA, 40 bp, Artificial Sequence
  Description of Artificial Sequence: Synthetic primer
gggccccgctgaccgccatgctgaccttcttcctcgtgtc

SEQ ID NO: 25049 - DNA, 40 bp, Artificial Sequence
  Description of Artificial Sequence: Synthetic primer
tcctgcggccggcgtgagggaggaggcctgggcgaggcta

SEQ ID NO: 25050 - DNA, 40 bp, Artificial Sequence
  Description of Artificial Sequence: Synthetic primer
actctctgagatacagaaatgaattgagtgacatgagcag

SEQ ID NO: 25051 - DNA, 40 bp, Artificial Sequence
  Description of Artificial Sequence: Synthetic primer
gtaaatttctctggcgttaagagacctttctgtagtgaag

SEQ ID NO: 25052 - DNA, 40 bp, Artificial Sequence
  Description of Artificial Sequence: Synthetic primer
tcactacgttttgacaactctgaaatgtgttaactcttag

SEQ ID NO: 25053 - DNA, 40 bp, Artificial Sequence
  Description of Artificial Sequence: Synthetic primer
cacctgtaaatactattttcttttgcaaaataacaaaaag

SEQ ID NO: 25054 - DNA, 40 bp, Artificial Sequence
  Description of Artificial Sequence: Synthetic primer
tttaaaagctcctggtgtcattactagaaaagtggtgaag

SEQ ID NO: 25055 - DNA, 40 bp, Artificial Sequence
  Description of Artificial Sequence: Synthetic primer
aaaagaaatgagcatttcggtttgctgacactgcatttta

SEQ ID NO: 25056 - DNA, 40 bp, Artificial Sequence
  Description of Artificial Sequence: Synthetic primer
ggggggcaggtactgaacacatggcttcttgctcttggag

SEQ ID NO: 25057 - DNA, 40 bp, Artificial Sequence
  Description of Artificial Sequence: Synthetic primer
ttcagcaacagcaagcaaatagtaattcctccaccaacac

SEQ ID NO: 25058 - DNA, 40 bp, Artificial Sequence
  Description of Artificial Sequence: Synthetic primer
tacaaggttgattctggcatctggataaccaagaaagctg

SEQ ID NO: 25059 - DNA, 40 bp, Artificial Sequence
  Description of Artificial Sequence: Synthetic primer
tatttctttggacccaacagtccagcttctctgtatcagc

SEQ ID NO: 25060 - DNA, 40 bp, Artificial Sequence
  Description of Artificial Sequence: Synthetic primer
gtggggccataaacggttcctggtgactcctgagtcttgc

SEQ ID NO: 25061 - DNA, 40 bp, Artificial Sequence
  Description of Artificial Sequence: Synthetic primer
ctgggagcagagagagaaaccctcttcatggaccagactc

SEQ ID NO: 25062 - DNA, 40 bp, Artificial Sequence
  Description of Artificial Sequence: Synthetic primer
tattgttcaataatccatggttcaaagactgtataaatgc

SEQ ID NO: 25063 - DNA, 40 bp, Artificial Sequence
  Description of Artificial Sequence: Synthetic primer
ccaggcttctggctcccctccagccaagagccccactgac

SEQ ID NO: 25064 - DNA, 40 bp, Artificial Sequence
  Description of Artificial Sequence: Synthetic primer
gtcctcactgtcactgagctgaaggtcgtcttcgagcatg

SEQ ID NO: 25065 - DNA, 40 bp, Artificial Sequence
  Description of Artificial Sequence: Synthetic primer
aggacaagacagccaggagagaggacccaaaggagaaacc

SEQ ID NO: 25066 - DNA, 40 bp, Artificial Sequence
  Description of Artificial Sequence: Synthetic primer
cttctatatctaatgaatcaagtaaatagccagaaaaagg

SEQ ID NO: 25067 - DNA, 40 bp, Artificial Sequence
  Description of Artificial Sequence: Synthetic primer
attgtccaacaaagtcccatgatatacacaaccaaaatgc

SEQ ID NO: 25068 - DNA, 40 bp, Artificial Sequence
  Description of Artificial Sequence: Synthetic primer
ctcattagctttgataaactggttaaaatctctcttattc

SEQ ID NO: 25069 - DNA, 40 bp, Artificial Sequence
  Description of Artificial Sequence: Synthetic primer
cacagctaggagcctctgacattgtctggtgttttacgtg

SEQ ID NO: 25070 - DNA, 40 bp, Artificial Sequence
  Description of Artificial Sequence: Synthetic primer
gatgtatatcagtctcactatacgagaatggcctttgaat

SEQ ID NO: 25071 - DNA, 40 bp, Artificial Sequence
  Description of Artificial Sequence: Synthetic primer
tcttttttgggacatatttctgccaattaaagactagaag

SEQ ID NO: 25072 - DNA, 40 bp, Artificial Sequence
  Description of Artificial Sequence: Synthetic primer
catgtgtttttccccacctatcccttagaaaacctaatgt

SEQ ID NO: 25073 - DNA, 40 bp, Artificial Sequence
  Description of Artificial Sequence: Synthetic primer
ccttgacgctatctcccatcacctctgctatccagacagg

SEQ ID NO: 25074 - DNA, 40 bp, Artificial Sequence
  Description of Artificial Sequence: Synthetic primer
gcgcggcgccttgcctccctgccgccgtcctcgccgcttc

SEQ ID NO: 25075 - DNA, 40 bp, Artificial Sequence
  Description of Artificial Sequence: Synthetic primer
cctggagttgactgactgagcaggctgtggggtggagcac

SEQ ID NO: 25076 - DNA, 40 bp, Artificial Sequence
  Description of Artificial Sequence: Synthetic primer
gggctgccctatgggcttcccaccggccgtccagagtttg

SEQ ID NO: 25077 - DNA, 40 bp, Artificial Sequence
  Description of Artificial Sequence: Synthetic primer
gagagagagaccgagaggttcagggagctgttgctgtatg

SEQ ID NO: 25078 - DNA, 40 bp, Artificial Sequence
  Description of Artificial Sequence: Synthetic primer
agcctaggagcagtccagagaagcggaagaaggccaggac

SEQ ID NO: 25079 - DNA, 40 bp, Artificial Sequence
  Description of Artificial Sequence: Synthetic primer
ttccatgacttccgggagattgaggtggaggtgtacatgg

SEQ ID NO: 25080 - DNA, 40 bp, Artificial Sequence
  Description of Artificial Sequence: Synthetic primer
ttctctcttgggctagagaaaggcctattggaggaacctg

SEQ ID NO: 25081 - DNA, 40 bp, Artificial Sequence
  Description of Artificial Sequence: Synthetic primer
tccaaaaatgtgtaagaacaactacctgagctaaataaag

SEQ ID NO: 25082 - DNA, 40 bp, Artificial Sequence
  Description of Artificial Sequence: Synthetic primer
taaatccaaatgaatggaatgctagaagacatgtattaac

SEQ ID NO: 25083 - DNA, 40 bp, Artificial Sequence
  Description of Artificial Sequence: Synthetic primer
tagtggccgtcttttgcctctttctctcaggctttcctac

SEQ ID NO: 25084 - DNA, 40 bp, Artificial Sequence
  Description of Artificial Sequence: Synthetic primer
atgcctgttcttcaaaagcagtggtttctttacgctgtat

SEQ ID NO: 25085 - DNA, 40 bp, Artificial Sequence
  Description of Artificial Sequence: Synthetic primer
ggggctttcactggcggcagaaattcctccgggtgaagag

SEQ ID NO: 25086 - DNA, 40 bp, Artificial Sequence
  Description of Artificial Sequence: Synthetic primer
ggaggtgcagttagcagtcgagggaacagtgacgttaatc

SEQ ID NO: 25087 - DNA, 40 bp, Artificial Sequence
  Description of Artificial Sequence: Synthetic primer
cacctcactgtcttcctcgatcttccctttccactcatag

SEQ ID NO: 25088 - DNA, 40 bp, Artificial Sequence
  Description of Artificial Sequence: Synthetic primer
gctggtcctccagggctgataggagaacaaggcatttctg

SEQ ID NO: 25089 - DNA, 40 bp, Artificial Sequence
  Description of Artificial Sequence: Synthetic primer
agaagcttggtttaggagtattacaatttccaactttgac

SEQ ID NO: 25090 - DNA, 40 bp, Artificial Sequence
  Description of Artificial Sequence: Synthetic primer
aatgaactgcagccctttctcgatgtccgccttccgtttc

SEQ ID NO: 25091 - DNA, 40 bp, Artificial Sequence
  Description of Artificial Sequence: Synthetic primer
cagagggataagaacatgacttgtattaaagtttctattg

SEQ ID NO: 25092 - DNA, 40 bp, Artificial Sequence
  Description of Artificial Sequence: Synthetic primer
cttcaccaattgaccaggagctctatctgtttgataccac

SEQ ID NO: 25093 - DNA, 40 bp, Artificial Sequence
  Description of Artificial Sequence: Synthetic primer
aggtgtttcctatctggtaactaaattcataatggaagtc

SEQ ID NO: 25094 - DNA, 40 bp, Artificial Sequence
  Description of Artificial Sequence: Synthetic primer
aaccacatacagcatcatatttcacagaaaactgtgtacg

SEQ ID NO: 25095 - DNA, 40 bp, Artificial Sequence
  Description of Artificial Sequence: Synthetic primer
gcggtaaatcctaaagaaggtgataaatgtcagtagtttc

SEQ ID NO: 25096 - DNA, 40 bp, Artificial Sequence
  Description of Artificial Sequence: Synthetic primer
ttcccaggaagataacacgacgacctgaggatttgattcg

SEQ ID NO: 25097 - DNA, 40 bp, Artificial Sequence
  Description of Artificial Sequence: Synthetic primer
gaattttttaagtgaattagttcaaactacaaaggagagg

SEQ ID NO: 25098 - DNA, 40 bp, Artificial Sequence
  Description of Artificial Sequence: Synthetic primer
tgtttcaaaacatattttttctgtttttataagtaagttg

SEQ ID NO: 25099 - DNA, 40 bp, Artificial Sequence
  Description of Artificial Sequence: Synthetic primer
cgggtcttctatgcgcgcctggcccccggctacatcaacc

SEQ ID NO: 25100 - DNA, 40 bp, Artificial Sequence
  Description of Artificial Sequence: Synthetic primer
catatgctccttcagttgaggctggcataccagtgatgat

SEQ ID NO: 25101 - DNA, 40 bp, Artificial Sequence
  Description of Artificial Sequence: Synthetic primer
caactgtgaataacaggtaagtagaaaacaaattgcaaag

SEQ ID NO: 25102 - DNA, 40 bp, Artificial Sequence
  Description of Artificial Sequence: Synthetic primer
ttttagattgatctttcaaaactgtgctgaattcaatgag

SEQ ID NO: 25103 - DNA, 40 bp, Artificial Sequence
  Description of Artificial Sequence: Synthetic primer
ggggtagaaagagctgatgagctgctggtactttgtccac

SEQ ID NO: 25104 - DNA, 40 bp, Artificial Sequence
  Description of Artificial Sequence: Synthetic primer
ttggctaggcgactgctggtcgggcccaggatctgatacg

SEQ ID NO: 25105 - DNA, 40 bp, Artificial Sequence
  Description of Artificial Sequence: Synthetic primer
aaccttgagtgccgttcacaccaggcggaccacgctcacc

SEQ ID NO: 25106 - DNA, 40 bp, Artificial Sequence
  Description of Artificial Sequence: Synthetic primer
cgagctgcccgtgactacaagatccagaaccatgggcatc

SEQ ID NO: 25107 - DNA, 40 bp, Artificial Sequence
  Description of Artificial Sequence: Synthetic primer
aattttttaatgataaatcctcctaaaaacattccagttg

SEQ ID NO: 25108 - DNA, 40 bp, Artificial Sequence
  Description of Artificial Sequence: Synthetic primer
agttctaaggtgagtatatcagcagaaatagtgtaaatgc

SEQ ID NO: 25109 - DNA, 40 bp, Artificial Sequence
  Description of Artificial Sequence: Synthetic primer
gagccaaactcagctcgcccggtttctcggcgaatgacag

SEQ ID NO: 25110 - DNA, 40 bp, Artificial Sequence
  Description of Artificial Sequence: Synthetic primer
tgacccacttggtgaaggtcttcttctgcacggcttcacg

SEQ ID NO: 25111 - DNA, 40 bp, Artificial Sequence
  Description of Artificial Sequence: Synthetic primer
cccccgatgcagcggtacttcctggcttgttgagcgtgtc

SEQ ID NO: 25112 - DNA, 40 bp, Artificial Sequence
  Description of Artificial Sequence: Synthetic primer
cactggttgcactctgttctccaggcgaagttctggtttc

SEQ ID NO: 25113 - DNA, 40 bp, Artificial Sequence
  Description of Artificial Sequence: Synthetic primer
gtatatacaaccaatttactggtaataccttggcttattg

SEQ ID NO: 25114 - DNA, 40 bp, Artificial Sequence
  Description of Artificial Sequence: Synthetic primer
atcaaaagcaacgtgagttgcctttattcgtggtgttagc

SEQ ID NO: 25115 - DNA, 40 bp, Artificial Sequence
  Description of Artificial Sequence: Synthetic primer
cgacaccgccagcgccgtggtggagttcaagcggaaggag

SEQ ID NO: 25116 - DNA, 40 bp, Artificial Sequence
  Description of Artificial Sequence: Synthetic primer
aagaggtgggtagggttacagatccaggttataactactc

SEQ ID NO: 25117 - DNA, 40 bp, Artificial Sequence
  Description of Artificial Sequence: Synthetic primer
aaggcagggcagctacccaggcaaatggcgtggaaggaag

SEQ ID NO: 25118 - DNA, 40 bp, Artificial Sequence
  Description of Artificial Sequence: Synthetic primer
cttgcagatcacgtgcagtgagatgcagcaaaaagttgaa

SEQ ID NO: 25119 - DNA, 40 bp, Artificial Sequence
  Description of Artificial Sequence: Synthetic primer
aaggcattaagagatgaatacatcatgtcaaaaactcttg

SEQ ID NO: 25120 - DNA, 40 bp, Artificial Sequence
  Description of Artificial Sequence: Synthetic primer
tagtaggtctcataaaatcatcttttgccagctgccttag

SEQ ID NO: 25121 - DNA, 40 bp, Artificial Sequence
  Description of Artificial Sequence: Synthetic primer
gatgtgtttggacttacaggggcacatgtttcttcccttc

SEQ ID NO: 25122 - DNA, 40 bp, Artificial Sequence
  Description of Artificial Sequence: Synthetic primer
ttgtgcagaaatttttgttgaaacaggtatcacagtcagc

SEQ ID NO: 25123 - DNA, 40 bp, Artificial Sequence
  Description of Artificial Sequence: Synthetic primer
cacgaagagtcaatgggactggctaagatcaaagtctgag

SEQ ID NO: 25124 - DNA, 40 bp, Artificial Sequence
  Description of Artificial Sequence: Synthetic primer
ccccctcctctgatgattaaacaggaacccagagattttg

SEQ ID NO: 25125 - DNA, 40 bp, Artificial Sequence
  Description of Artificial Sequence: Synthetic primer
ggtgtcaccagcctccagctgggctacatcgaccttcctc

SEQ ID NO: 25126 - DNA, 40 bp, Artificial Sequence
  Description of Artificial Sequence: Synthetic primer
gggcttttatggaaaaacaccccgctccaaagagataagg

SEQ ID NO: 25127 - DNA, 40 bp, Artificial Sequence
  Description of Artificial Sequence: Synthetic primer
agatgatttccttgtagactactttaatgaattcctaagc

SEQ ID NO: 25128 - DNA, 40 bp, Artificial Sequence
  Description of Artificial Sequence: Synthetic primer
cgacaagccgttatgaaagagatgaaaagtggggattttg

SEQ ID NO: 25129 - DNA, 40 bp, Artificial Sequence
  Description of Artificial Sequence: Synthetic primer
gctgccggctgtgcgggcgctccggagagaccgacagaag

SEQ ID NO: 25130 - DNA, 40 bp, Artificial Sequence
  Description of Artificial Sequence: Synthetic primer
gaccggagacgggcggcaagtttgaagtcgacacccagag

SEQ ID NO: 25131 - DNA, 40 bp, Artificial Sequence
  Description of Artificial Sequence: Synthetic primer
agagctgcaccttgactttaagtgagagcacgatgaatac

SEQ ID NO: 25132 - DNA, 40 bp, Artificial Sequence
  Description of Artificial Sequence: Synthetic primer
ttattacataaaatttctcctgtgtgctaaaaatgctaac

SEQ ID NO: 25133 - DNA, 40 bp, Artificial Sequence
  Description of Artificial Sequence: Synthetic primer
gagttcattatcacgtgaagtgagccagcattttaatcag

SEQ ID NO: 25134 - DNA, 40 bp, Artificial Sequence
  Description of Artificial Sequence: Synthetic primer
ggggccaccacagacctgtgattatagggcttctctgtgc

SEQ ID NO: 25135 - DNA, 40 bp, Artificial Sequence
  Description of Artificial Sequence: Synthetic primer
aggtggcatattggccatgttagggccataaggccggttg

SEQ ID NO: 25136 - DNA, 40 bp, Artificial Sequence
  Description of Artificial Sequence: Synthetic primer
tgaagctgatgtataagcgtagtcaattctcccttacttg

SEQ ID NO: 25137 - DNA, 40 bp, Artificial Sequence
  Description of Artificial Sequence: Synthetic primer
tcgaaattctgataacttcatgaaccctgttcttaattgc

SEQ ID NO: 25138 - DNA, 40 bp, Artificial Sequence
  Description of Artificial Sequence: Synthetic primer
ccctttttttcatccacatcaaaggcaggaatacaacaag

SEQ ID NO: 25139 - DNA, 40 bp, Artificial Sequence
  Description of Artificial Sequence: Synthetic primer
agcagggggaggggagcaccatcttgcaacacatcagcac

SEQ ID NO: 25140 - DNA, 40 bp, Artificial Sequence
  Description of Artificial Sequence: Synthetic primer
ccccggtggcctcaggggtttcgtggttggaggccatcac

SEQ ID NO: 25141 - DNA, 40 bp, Artificial Sequence
  Description of Artificial Sequence: Synthetic primer
agaaaatggaccacccttactgaagaaaatcaaacaagag

SEQ ID NO: 25142 - DNA, 40 bp, Artificial Sequence
  Description of Artificial Sequence: Synthetic primer
gaatctgaagtttttatctgtgcctggaaccctgttagtg

SEQ ID NO: 25143 - DNA, 40 bp, Artificial Sequence
  Description of Artificial Sequence: Synthetic primer
tctgcgggtcccctgcggcccctgctgccgctgcgctgtc

SEQ ID NO: 25144 - DNA, 40 bp, Artificial Sequence
  Description of Artificial Sequence: Synthetic primer
aattaaatgcctttaagagatataattaacgtgcagtttt

SEQ ID NO: 25145 - DNA, 40 bp, Artificial Sequence
  Description of Artificial Sequence: Synthetic primer
gccttaaatttcaggtagatcaggtacactgtggcatagg

SEQ ID NO: 25146 - DNA, 40 bp, Artificial Sequence
  Description of Artificial Sequence: Synthetic primer
acagcaagatgccggagatgttgaagaaaaagtggcacag

SEQ ID NO: 25147 - DNA, 40 bp, Artificial Sequence
  Description of Artificial Sequence: Synthetic primer
aatgaaattaataagaaaggaaaatctctcttacaacagc

SEQ ID NO: 25148 - DNA, 40 bp, Artificial Sequence
  Description of Artificial Sequence: Synthetic primer
gattgaattttcaatgtcatagtgtgtggaaatactactc

SEQ ID NO: 25149 - DNA, 40 bp, Artificial Sequence
  Description of Artificial Sequence: Synthetic primer
gtaaaaaaataaaccattgtaaaaccttatgaaaagacac

SEQ ID NO: 25150 - DNA, 40 bp, Artificial Sequence
  Description of Artificial Sequence: Synthetic primer
ctagcttgatccatcattctgaactgccacacagaagaac

SEQ ID NO: 25151 - DNA, 40 bp, Artificial Sequence
  Description of Artificial Sequence: Synthetic primer
agttttttggaaagtcacttgagttttaaagaaactggac

SEQ ID NO: 25152 - DNA, 40 bp, Artificial Sequence
  Description of Artificial Sequence: Synthetic primer
acattgtgcattttcaaggatatgtttgtgtggatatctg

SEQ ID NO: 25153 - DNA, 40 bp, Artificial Sequence
  Description of Artificial Sequence: Synthetic primer
aggagattacatcattagagagggcgaggaaggaagtacc

SEQ ID NO: 25154 - DNA, 40 bp, Artificial Sequence
  Description of Artificial Sequence: Synthetic primer
gtgtaccctacaacaaacttaaatcaccagctatttcatc

SEQ ID NO: 25155 - DNA, 40 bp, Artificial Sequence
  Description of Artificial Sequence: Synthetic primer
ctacctaataggcagttccgtaattaggcagctaaaagtt

SEQ ID NO: 25156 - DNA, 40 bp, Artificial Sequence
  Description of Artificial Sequence: Synthetic primer
gattctggacaatcaggaagtccaagccacaatgatcctg

SEQ ID NO: 25157 - DNA, 40 bp, Artificial Sequence
  Description of Artificial Sequence: Synthetic primer
gtctctccaagtcgtgaattagagcagcagcaagtttcta

SEQ ID NO: 25158 - DNA, 40 bp, Artificial Sequence
  Description of Artificial Sequence: Synthetic primer
tgtactccatattttatgctggttgtctgcaagcttgtgc

SEQ ID NO: 25159 - DNA, 40 bp, Artificial Sequence
  Description of Artificial Sequence: Synthetic primer
tgatgtcattccagaaaggacacggcctcttcaggtttac

SEQ ID NO: 25160 - DNA, 40 bp, Artificial Sequence
  Description of Artificial Sequence: Synthetic primer
gatagaaaaagggggatcgaaatccggaggaacggagtag

SEQ ID NO: 25161 - DNA, 40 bp, Artificial Sequence
  Description of Artificial Sequence: Synthetic primer
cagcaattttaaggaaatcttcacctgttgctttgtaaac

SEQ ID NO: 25162 - DNA, 40 bp, Artificial Sequence
  Description of Artificial Sequence: Synthetic primer
ctgctccactaatctctcagctactgaggtttgggaggac

SEQ ID NO: 25163 - DNA, 40 bp, Artificial Sequence
  Description of Artificial Sequence: Synthetic primer
atcttcatataaactcaagtgcctgctacacatacaacac

SEQ ID NO: 25164 - DNA, 40 bp, Artificial Sequence
  Description of Artificial Sequence: Synthetic primer
gatccttttaatagtctctgccacactgtgttttggaatg

SEQ ID NO: 25165 - DNA, 40 bp, Artificial Sequence
  Description of Artificial Sequence: Synthetic primer
tcctcctccttgagtccagaagcagccacacactatcttc

SEQ ID NO: 25166 - DNA, 40 bp, Artificial Sequence
  Description of Artificial Sequence: Synthetic primer
ggcatcattcagtaggttagctgcatctttgtatttattc

SEQ ID NO: 25167 - DNA, 40 bp, Artificial Sequence
  Description of Artificial Sequence: Synthetic primer
catttgagcaatagtcttttcatattcagctacaattttc

SEQ ID NO: 25168 - DNA, 40 bp, Artificial Sequence
  Description of Artificial Sequence: Synthetic primer
gtttcagtgcagcatggttactaacgctatgtcagactaa

SEQ ID NO: 25169 - DNA, 40 bp, Artificial Sequence
  Description of Artificial Sequence: Synthetic primer
tgcctcgctcctcttgggcgccaaacccttcacgctcacc

SEQ ID NO: 25170 - DNA, 40 bp, Artificial Sequence
  Description of Artificial Sequence: Synthetic primer
ggcctggtacacaacctcttcgaacctgtccatgatcttc

SEQ ID NO: 25171 - DNA, 40 bp, Artificial Sequence
  Description of Artificial Sequence: Synthetic primer
cgggcctggggagcgggctgaccacacgtaactgtcatgc

SEQ ID NO: 25172 - DNA, 40 bp, Artificial Sequence
  Description of Artificial Sequence: Synthetic primer
ctggtgtccacaagactaggccacgaaggagcagaaccag

SEQ ID NO: 25173 - DNA, 40 bp, Artificial Sequence
  Description of Artificial Sequence: Synthetic primer
aatcttgtttataaagcaagccatgcaaaactacaacgac

SEQ ID NO: 25174 - DNA, 40 bp, Artificial Sequence
  Description of Artificial Sequence: Synthetic primer
catgcagaatgccaccaagtatggcaacatgacagaggac

SEQ ID NO: 25175 - DNA, 40 bp, Artificial Sequence
  Description of Artificial Sequence: Synthetic primer
gcaggtcccggttgggctcatacatattatttacaacgtc

SEQ ID NO: 25176 - DNA, 40 bp, Artificial Sequence
  Description of Artificial Sequence: Synthetic primer
tcttataaccattgactggaaacccattgcaagtgctttc

SEQ ID NO: 25177 - DNA, 40 bp, Artificial Sequence
  Description of Artificial Sequence: Synthetic primer
gccgctgctgctcaccaggaaccaggacgtggcactcatc

SEQ ID NO: 25178 - DNA, 40 bp, Artificial Sequence
  Description of Artificial Sequence: Synthetic primer
tcaggagcagaggtgtgtgcacaggtaagggtctgagtgc

SEQ ID NO: 25179 - DNA, 40 bp, Artificial Sequence
  Description of Artificial Sequence: Synthetic primer
acctgtcacttggaaacattacatttaattcaggctcaac

SEQ ID NO: 25180 - DNA, 40 bp, Artificial Sequence
  Description of Artificial Sequence: Synthetic primer
atacttgatatttgaaagccatggtcatcaggtcatagag

SEQ ID NO: 25181 - DNA, 40 bp, Artificial Sequence
  Description of Artificial Sequence: Synthetic primer
agctgtcaccatcagacacatctcaatgaactggcaagag

SEQ ID NO: 25182 - DNA, 40 bp, Artificial Sequence
  Description of Artificial Sequence: Synthetic primer
ggcactggtagactatcactccacgaagaaactcaagaag

SEQ ID NO: 25183 - DNA, 40 bp, Artificial Sequence
  Description of Artificial Sequence: Synthetic primer
cctggtttggatatgcgcctgtatgaggaagatgatttgg

SEQ ID NO: 25184 - DNA, 40 bp, Artificial Sequence
  Description of Artificial Sequence: Synthetic primer
atggggatatggcacatactggtttctgatgactccgttc

SEQ ID NO: 25185 - DNA, 40 bp, Artificial Sequence
  Description of Artificial Sequence: Synthetic primer
tattcaagtgaatatggagccaactgacttagaaggaaag

SEQ ID NO: 25186 - DNA, 40 bp, Artificial Sequence
  Description of Artificial Sequence: Synthetic primer
agccccagctggatagaagatacgcttatacagaagaacc

SEQ ID NO: 25187 - DNA, 40 bp, Artificial Sequence
  Description of Artificial Sequence: Synthetic primer
ctttgaccggagcgagctcagtgacaagaagcggccagag

SEQ ID NO: 25188 - DNA, 40 bp, Artificial Sequence
  Description of Artificial Sequence: Synthetic primer
gccaaacttttggaggaaggtttgagtcttccaggctgtc

SEQ ID NO: 25189 - DNA, 40 bp, Artificial Sequence
  Description of Artificial Sequence: Synthetic primer
agctgtgacccaagctggactggacacgactgttctatcg

SEQ ID NO: 25190 - DNA, 40 bp, Artificial Sequence
  Description of Artificial Sequence: Synthetic primer
gaagttggcccaggcataggagcctgagaatacaatgcag

SEQ ID NO: 25191 - DNA, 40 bp, Artificial Sequence
  Description of Artificial Sequence: Synthetic primer
cccacagaagccagggagctgcagcactgtcccgcctgag

SEQ ID NO: 25192 - DNA, 40 bp, Artificial Sequence
  Description of Artificial Sequence: Synthetic primer
tctcgggctcctggatatttatggctttgaagtgtttcag

SEQ ID NO: 25193 - DNA, 40 bp, Artificial Sequence
  Description of Artificial Sequence: Synthetic primer
ctctgagagccggaacagcatggcaggcgttggtctcctg

SEQ ID NO: 25194 - DNA, 40 bp, Artificial Sequence
  Description of Artificial Sequence: Synthetic primer
aggagggtggggtggggagtgctgtttactttgctgaaac

SEQ ID NO: 25195 - DNA, 40 bp, Artificial Sequence
  Description of Artificial Sequence: Synthetic primer
gggacccctccggctccccgcctctacgtcccaggccatc

SEQ ID NO: 25196 - DNA, 40 bp, Artificial Sequence
  Description of Artificial Sequence: Synthetic primer
tgctcaagactggatctcagttcttcacgccccgatttcg

SEQ ID NO: 25197 - DNA, 40 bp, Artificial Sequence
  Description of Artificial Sequence: Synthetic primer
aggatcagtcttggccccaaagcgcgacgcacaaatccac

SEQ ID NO: 25198 - DNA, 40 bp, Artificial Sequence
  Description of Artificial Sequence: Synthetic primer
caagtgagtctagctcttcaccctgtgctatttcgtcttc

SEQ ID NO: 25199 - DNA, 40 bp, Artificial Sequence
  Description of Artificial Sequence: Synthetic primer
cactacggcgtgcgaacctgcgagggctgcaagggctttt

SEQ ID NO: 25200 - DNA, 40 bp, Artificial Sequence
  Description of Artificial Sequence: Synthetic primer
gctgtgactgacgcagcggccgtgccaccatgtgaccaag

SEQ ID NO: 25201 - DNA, 40 bp, Artificial Sequence
  Description of Artificial Sequence: Synthetic primer
ccaccacacaacaggagacgaatatttccccctagcaagc

SEQ ID NO: 25202 - DNA, 40 bp, Artificial Sequence
  Description of Artificial Sequence: Synthetic primer
agaataattaccgcatcgatgccaaccaggagctgctggc

SEQ ID NO: 25203 - DNA, 40 bp, Artificial Sequence
  Description of Artificial Sequence: Synthetic primer
ctgggtaaccagaatcaggtgtgaatgtgttgagattttt

SEQ ID NO: 25204 - DNA, 40 bp, Artificial Sequence
  Description of Artificial Sequence: Synthetic primer
tgcccacaagctgttcttagggctcacactcgccttttgg

SEQ ID NO: 25205 - DNA, 40 bp, Artificial Sequence
  Description of Artificial Sequence: Synthetic primer
ttccttctttagcaccatggcttcaatccgaagtgaatag

SEQ ID NO: 25206 - DNA, 40 bp, Artificial Sequence
  Description of Artificial Sequence: Synthetic primer
cggaccaataccttgaaaacccgacgccgagaccttgcac

SEQ ID NO: 25207 - DNA, 40 bp, Artificial Sequence
  Description of Artificial Sequence: Synthetic primer
cctctctactctgccagtctcagccttcaaagcacttgac

SEQ ID NO: 25208 - DNA, 40 bp, Artificial Sequence
  Description of Artificial Sequence: Synthetic primer
ttgttccttacaaggcaggaagaccggcagctcatcaacg

SEQ ID NO: 25209 - DNA, 40 bp, Artificial Sequence
  Description of Artificial Sequence: Synthetic primer
caaaccaggaccctgtccaatctttgacaattgggagctg

SEQ ID NO: 25210 - DNA, 40 bp, Artificial Sequence
  Description of Artificial Sequence: Synthetic primer
cacagcctacccagttctgagcatcttggggcagatggag

SEQ ID NO: 25211 - DNA, 40 bp, Artificial Sequence
  Description of Artificial Sequence: Synthetic primer
atgacttctgatattctgtaagcagaagagtgatcagtgg

SEQ ID NO: 25212 - DNA, 40 bp, Artificial Sequence
  Description of Artificial Sequence: Synthetic primer
ctggccaacatcaagatttgggtgctaaccggagacaagc

SEQ ID NO: 25213 - DNA, 40 bp, Artificial Sequence
  Description of Artificial Sequence: Synthetic primer
tgccagtagccccagtggcggtgccgacaagcccctcaag

SEQ ID NO: 25214 - DNA, 40 bp, Artificial Sequence
  Description of Artificial Sequence: Synthetic primer
ccgtctttggtatgtattggctaataaaatcagttctgtg

SEQ ID NO: 25215 - DNA, 40 bp, Artificial Sequence
  Description of Artificial Sequence: Synthetic primer
gccgggtctcttcgtatttcttcttccattcatttgcttc

SEQ ID NO: 25216 - DNA, 40 bp, Artificial Sequence
  Description of Artificial Sequence: Synthetic primer
ctctgagtatgagcttcccgaagaccctcgctgggagctg

SEQ ID NO: 25217 - DNA, 40 bp, Artificial Sequence
  Description of Artificial Sequence: Synthetic primer
ggtgctggccgccagcagcctctacttccgcgacctgttc

SEQ ID NO: 25218 - DNA, 40 bp, Artificial Sequence
  Description of Artificial Sequence: Synthetic primer
cgtcttctttcccagcctgtctacaacaccttagggcttc

SEQ ID NO: 25219 - DNA, 40 bp, Artificial Sequence
  Description of Artificial Sequence: Synthetic primer
aaaaaaactgtggcccaagtggaacccttgaccttttctc

SEQ ID NO: 25220 - DNA, 40 bp, Artificial Sequence
  Description of Artificial Sequence: Synthetic primer
tggtggtgactgtgctgccccgctaccatggaaatgactg

SEQ ID NO: 25221 - DNA, 40 bp, Artificial Sequence
  Description of Artificial Sequence: Synthetic primer
actgtgggactattatggttaacagaactgtcttaatatg

SEQ ID NO: 25222 - DNA, 40 bp, Artificial Sequence
  Description of Artificial Sequence: Synthetic primer
cacaggctccaccagcagctcttccagtggcaaaaagaac

SEQ ID NO: 25223 - DNA, 40 bp, Artificial Sequence
  Description of Artificial Sequence: Synthetic primer
cagcctggagaggcgcttcgtgctgcacacccccgcgttc

SEQ ID NO: 25224 - DNA, 40 bp, Artificial Sequence
  Description of Artificial Sequence: Synthetic primer
tgattccatcagaacttcacttcctctagtagtactctgc

SEQ ID NO: 25225 - DNA, 40 bp, Artificial Sequence
  Description of Artificial Sequence: Synthetic primer
cacaagattcatcgtgattcaggagacaattctcagacag

SEQ ID NO: 25226 - DNA, 40 bp, Artificial Sequence
  Description of Artificial Sequence: Synthetic primer
taaattaaaggtacaagttaaggcacacagaagattatag

SEQ ID NO: 25227 - DNA, 40 bp, Artificial Sequence
  Description of Artificial Sequence: Synthetic primer
agcgtccagggagggaggaggaggtggtcctcaggtgcag

SEQ ID NO: 25228 - DNA, 40 bp, Artificial Sequence
  Description of Artificial Sequence: Synthetic primer
cacctgttccttgtgcttcagatttgctaccttcttattc

SEQ ID NO: 25229 - DNA, 40 bp, Artificial Sequence
  Description of Artificial Sequence: Synthetic primer
gtctgaaacagacagataaagttccaagtaaaacggtagc

SEQ ID NO: 25230 - DNA, 40 bp, Artificial Sequence
  Description of Artificial Sequence: Synthetic primer
tgaggattcagccccacaatattcacgcctcttcccaaac

SEQ ID NO: 25231 - DNA, 40 bp, Artificial Sequence
  Description of Artificial Sequence: Synthetic primer
agacgcggctttcccttcggcgcccgggtgcgtgcgtgtc

SEQ ID NO: 25232 - DNA, 40 bp, Artificial Sequence
  Description of Artificial Sequence: Synthetic primer
tttagattgtaaagtgcaaggacaaaggttaaaaggttag

SEQ ID NO: 25233 - DNA, 40 bp, Artificial Sequence
  Description of Artificial Sequence: Synthetic primer
atttactgcagcacattaatctcatgaagacatcagacag

SEQ ID NO: 25234 - DNA, 40 bp, Artificial Sequence
  Description of Artificial Sequence: Synthetic primer
ccatctttgaagataacgtgagttacttgtttgttaaaag

SEQ ID NO: 25235 - DNA, 40 bp, Artificial Sequence
  Description of Artificial Sequence: Synthetic primer
ggtttgatgagattgggtcgtgatctctgaggtttatttg

SEQ ID NO: 25236 - DNA, 40 bp, Artificial Sequence
  Description of Artificial Sequence: Synthetic primer
gtgatggttacaggtcagtacaacctcagtccttagaacc

SEQ ID NO: 25237 - DNA, 40 bp, Artificial Sequence
  Description of Artificial Sequence: Synthetic primer
attcaaaatctgcaatggttatttacaagtcaatctactg

SEQ ID NO: 25238 - DNA, 40 bp, Artificial Sequence
  Description of Artificial Sequence: Synthetic primer
gaactaagcctctgattggctatgcccatataccctcctc

SEQ ID NO: 25239 - DNA, 40 bp, Artificial Sequence
  Description of Artificial Sequence: Synthetic primer
aaacaaacatttcctcttcttaatctctctccctgaaatg

SEQ ID NO: 25240 - DNA, 40 bp, Artificial Sequence
  Description of Artificial Sequence: Synthetic primer
tgggagtgtgctagtcctcggaagcaggtgtgttatgttc

SEQ ID NO: 25241 - DNA, 40 bp, Artificial Sequence
  Description of Artificial Sequence: Synthetic primer
tgatgaaaagggctgtcatctggttggatacttctctaag

SEQ ID NO: 25242 - DNA, 40 bp, Artificial Sequence
  Description of Artificial Sequence: Synthetic primer
ttttctttcctgacatattgtcgtttgcatgcagtcactc

SEQ ID NO: 25243 - DNA, 40 bp, Artificial Sequence
  Description of Artificial Sequence: Synthetic primer
ccagcatgacaccagcctgccccactgccgattctatgag

SEQ ID NO: 25244 - DNA, 40 bp, Artificial Sequence
  Description of Artificial Sequence: Synthetic primer
tgaggaagatgttgcagagttgtcaatttctccttcagac

SEQ ID NO: 25245 - DNA, 40 bp, Artificial Sequence
  Description of Artificial Sequence: Synthetic primer
ttctcacactcccagcctcccacaatccgagactggatga

SEQ ID NO: 25246 - DNA, 40 bp, Artificial Sequence
  Description of Artificial Sequence: Synthetic primer
caggagcccagaaggtggatacaggctctggaatcatcag

SEQ ID NO: 25247 - DNA, 40 bp, Artificial Sequence
  Description of Artificial Sequence: Synthetic primer
gccactcccctaccaccatggcgagcagtgcctttactcc

SEQ ID NO: 25248 - DNA, 40 bp, Artificial Sequence
  Description of Artificial Sequence: Synthetic primer
gttctactgtaggggacaaacaactattttattcttggtg

SEQ ID NO: 25249 - DNA, 40 bp, Artificial Sequence
  Description of Artificial Sequence: Synthetic primer
gcctgtcaggtccccaggacgtaccatgtggctataaaac

SEQ ID NO: 25250 - DNA, 40 bp, Artificial Sequence
  Description of Artificial Sequence: Synthetic primer
caatcctgtgcatgtactcgccagaagggcagctgaagac

SEQ ID NO: 25251 - DNA, 40 bp, Artificial Sequence
  Description of Artificial Sequence: Synthetic primer
gtggaagcattcatcaggggagataaccataaaggatttg

SEQ ID NO: 25252 - DNA, 40 bp, Artificial Sequence
  Description of Artificial Sequence: Synthetic primer
cttgaaaagagggagtgattactgcattatattacgaatc

SEQ ID NO: 25253 - DNA, 40 bp, Artificial Sequence
  Description of Artificial Sequence: Synthetic primer
tgtgcatgcccagtagggaaactgcaaagggagaaatgac

SEQ ID NO: 25254 - DNA, 40 bp, Artificial Sequence
  Description of Artificial Sequence: Synthetic primer
cagtactgagaggagatccttatccctatccctgccacat

SEQ ID NO: 25255 - DNA, 40 bp, Artificial Sequence
  Description of Artificial Sequence: Synthetic primer
caggttgtttcctaatcttcgatccatcagcctccacaag

SEQ ID NO: 25256 - DNA, 40 bp, Artificial Sequence
  Description of Artificial Sequence: Synthetic primer
ttctgcatgccagggtagacacccatctgaccgccaccac

SEQ ID NO: 25257 - DNA, 40 bp, Artificial Sequence
  Description of Artificial Sequence: Synthetic primer
acactcagatgtatggcaatattattcgtggctgggatcg

SEQ ID NO: 25258 - DNA, 40 bp, Artificial Sequence
  Description of Artificial Sequence: Synthetic primer
agattctccccgaatcctccccaacaaggggctgttaggc

SEQ ID NO: 25259 - DNA, 40 bp, Artificial Sequence
  Description of Artificial Sequence: Synthetic primer
cccgggcagcctgcccttccccttcaacctcttgctcaag

SEQ ID NO: 25260 - DNA, 40 bp, Artificial Sequence
  Description of Artificial Sequence: Synthetic primer
atggacagcaccagctcactgcacgggagcagcctccatc

SEQ ID NO: 25261 - DNA, 40 bp, Artificial Sequence
  Description of Artificial Sequence: Synthetic primer
gtcctaggaagctcattttctcttccggccacaagctttc

SEQ ID NO: 25262 - DNA, 40 bp, Artificial Sequence
  Description of Artificial Sequence: Synthetic primer
acaaagacagtttggctgggggaatcctgggggccagcac

SEQ ID NO: 25263 - DNA, 40 bp, Artificial Sequence
  Description of Artificial Sequence: Synthetic primer
gtggaaattgacacgtgccaccgcctggcgttcgcttgtg

SEQ ID NO: 25264 - DNA, 40 bp, Artificial Sequence
  Description of Artificial Sequence: Synthetic primer
gtagaaggcaggcgacgggcaaatgagaacagcaacatac

SEQ ID NO: 25265 - DNA, 40 bp, Artificial Sequence
  Description of Artificial Sequence: Synthetic primer
ccactgggcgctcaggcttgtgggtgtgacctgagtgaac

SEQ ID NO: 25266 - DNA, 40 bp, Artificial Sequence
  Description of Artificial Sequence: Synthetic primer
gaggagctgcaaggtgcccagctgttcctccggctccaac

SEQ ID NO: 25267 - DNA, 40 bp, Artificial Sequence
  Description of Artificial Sequence: Synthetic primer
atttcacatattcacaggtatatagagagccaggaggaag

SEQ ID NO: 25268 - DNA, 40 bp, Artificial Sequence
  Description of Artificial Sequence: Synthetic primer
gtcagctgtctttgtagttaggaaatagatccaataaagc

SEQ ID NO: 25269 - DNA, 40 bp, Artificial Sequence
  Description of Artificial Sequence: Synthetic primer
ttggacgagaagcagcacgcctggctgcccttaaccatcg

SEQ ID NO: 25270 - DNA, 40 bp, Artificial Sequence
  Description of Artificial Sequence: Synthetic primer
tcgacttctgaatcatttggaaagggagagagggagagag

SEQ ID NO: 25271 - DNA, 40 bp, Artificial Sequence
  Description of Artificial Sequence: Synthetic primer
ttgtcaaatactatttatgaagtcctacattaaataattc

SEQ ID NO: 25272 - DNA, 40 bp, Artificial Sequence
  Description of Artificial Sequence: Synthetic primer
ctgttgcatcttccatcttatctcctgagctcacctgctg

SEQ ID NO: 25273 - DNA, 40 bp, Artificial Sequence
  Description of Artificial Sequence: Synthetic primer
gagtccaactttccctcctgttcctagacagactcacacc

SEQ ID NO: 25274 - DNA, 40 bp, Artificial Sequence
  Description of Artificial Sequence: Synthetic primer
gagctgtataatttagcaggaagggactatgggagaatac

SEQ ID NO: 25275 - DNA, 40 bp, Artificial Sequence
  Description of Artificial Sequence: Synthetic primer
cggcatgtgctcccgggctccggggcgtagggtgtaaatg

SEQ ID NO: 25276 - DNA, 40 bp, Artificial Sequence
  Description of Artificial Sequence: Synthetic primer
gaatgaggtgctcatctggaataggtttcttggtaatttt

SEQ ID NO: 25277 - DNA, 40 bp, Artificial Sequence
  Description of Artificial Sequence: Synthetic primer
agaactgagattttgaggcatggatggccagtccccagag

SEQ ID NO: 25278 - DNA, 40 bp, Artificial Sequence
  Description of Artificial Sequence: Synthetic primer
gaagaagtttgaccatcaccctcagcagttcagctccttc

SEQ ID NO: 25279 - DNA, 40 bp, Artificial Sequence
  Description of Artificial Sequence: Synthetic primer
aaattaatgtcttccagcctacttgtgtcttccaacaaag

SEQ ID NO: 25280 - DNA, 40 bp, Artificial Sequence
  Description of Artificial Sequence: Synthetic primer
caaacacagtctcatctttgtgtctcctgattcagctgtg

SEQ ID NO: 25281 - DNA, 40 bp, Artificial Sequence
  Description of Artificial Sequence: Synthetic primer
gagtcgctggcagcctgctatatactacatgtcctgtcac

SEQ ID NO: 25282 - DNA, 40 bp, Artificial Sequence
  Description of Artificial Sequence: Synthetic primer
tccgaggagggtctctcttcttctttgctggccttgtcac

SEQ ID NO: 25283 - DNA, 40 bp, Artificial Sequence
  Description of Artificial Sequence: Synthetic primer
atgtacgtagctggttgaggaggaggttctctaggacagc

SEQ ID NO: 25284 - DNA, 40 bp, Artificial Sequence
  Description of Artificial Sequence: Synthetic primer
ctgaggtgtccgaggcgccgccgcagtcctgggcattctc

SEQ ID NO: 25285 - DNA, 40 bp, Artificial Sequence
  Description of Artificial Sequence: Synthetic primer
acattgatgttcagtcgatgtatcagcctcaagcaaaacc

SEQ ID NO: 25286 - DNA, 40 bp, Artificial Sequence
  Description of Artificial Sequence: Synthetic primer
tgtaaactcacagttcctcgtgtcaaattccggagactac

SEQ ID NO: 25287 - DNA, 40 bp, Artificial Sequence
  Description of Artificial Sequence: Synthetic primer
aggaaaaaaatcaacatctgtaaattaagaatacagcaat

SEQ ID NO: 25288 - DNA, 40 bp, Artificial Sequence
  Description of Artificial Sequence: Synthetic primer
ccttgtttcagatgattctatgtctcatgatgtattgttg

SEQ ID NO: 25289 - DNA, 40 bp, Artificial Sequence
  Description of Artificial Sequence: Synthetic primer
tgccagagaatggatctctcctgctttctgcttgtggttc

SEQ ID NO: 25290 - DNA, 40 bp, Artificial Sequence
  Description of Artificial Sequence: Synthetic primer
tgcaggatagtaccctcatgaatttcaatgtgtggggaag

SEQ ID NO: 25291 - DNA, 40 bp, Artificial Sequence
  Description of Artificial Sequence: Synthetic primer
cttcttaatcgctctagctcttgttctgaagatgtaaatg

SEQ ID NO: 25292 - DNA, 40 bp, Artificial Sequence
  Description of Artificial Sequence: Synthetic primer
gccaattatcaagttgccatttgtttgttggcgggggttc

SEQ ID NO: 25293 - DNA, 40 bp, Artificial Sequence
  Description of Artificial Sequence: Synthetic primer
aaggaaaaaataaagcttatgtaacccatattaagcaaaa

SEQ ID NO: 25294 - DNA, 40 bp, Artificial Sequence
  Description of Artificial Sequence: Synthetic primer
cattctggcccagtctggggttgatcccagaggcctgaac

SEQ ID NO: 25295 - DNA, 40 bp, Artificial Sequence
  Description of Artificial Sequence: Synthetic primer
gcctttcccgttctttcatacgcagcacattccggtcttc

SEQ ID NO: 25296 - DNA, 40 bp, Artificial Sequence
  Description of Artificial Sequence: Synthetic primer
gcttttggatagggagaggtctcctgcaccatcatctagg

SEQ ID NO: 25297 - DNA, 40 bp, Artificial Sequence
  Description of Artificial Sequence: Synthetic primer
actcggggaattgacattccagaattagtgtcatcttgag

SEQ ID NO: 25298 - DNA, 40 bp, Artificial Sequence
  Description of Artificial Sequence: Synthetic primer
gcacaggcctgggcacatgggagtccccaaaattacattg

SEQ ID NO: 25299 - DNA, 40 bp, Artificial Sequence
  Description of Artificial Sequence: Synthetic primer
ccaactacagaaatggtttcaaatgaatctgtagactacc

SEQ ID NO: 25300 - DNA, 40 bp, Artificial Sequence
  Description of Artificial Sequence: Synthetic primer
gatgcagcctatactccacacatcacaaggctgtgaccag

SEQ ID NO: 25301 - DNA, 40 bp, Artificial Sequence
  Description of Artificial Sequence: Synthetic primer
ctccaaagctccctccttccccaacactggttgcccattc

SEQ ID NO: 25302 - DNA, 40 bp, Artificial Sequence
  Description of Artificial Sequence: Synthetic primer
tgggtaccctggtgatgtggtgcagaagagcggggaggtg

SEQ ID NO: 25303 - DNA, 40 bp, Artificial Sequence
  Description of Artificial Sequence: Synthetic primer
atttcaggctttattgtacatggtaatgtttcagggagtg

SEQ ID NO: 25304 - DNA, 40 bp, Artificial Sequence
  Description of Artificial Sequence: Synthetic primer
ggctgctggataatgggtgatgtcgggaaatgaagagtcg

SEQ ID NO: 25305 - DNA, 40 bp, Artificial Sequence
  Description of Artificial Sequence: Synthetic primer
tgttgcggggcgcctcctgagcacacggtgggcggtggtc

SEQ ID NO: 25306 - DNA, 40 bp, Artificial Sequence
  Description of Artificial Sequence: Synthetic primer
gagctgggaacccagcgagcgcctgaccttcctcctcctc

SEQ ID NO: 25307 - DNA, 40 bp, Artificial Sequence
  Description of Artificial Sequence: Synthetic primer
acagctcattgcagcaagaggtggacatcaagaccaaaaa

SEQ ID NO: 25308 - DNA, 40 bp, Artificial Sequence
  Description of Artificial Sequence: Synthetic primer
caggcactgattcacattacccaaagtcaccagataatag

SEQ ID NO: 25309 - DNA, 40 bp, Artificial Sequence
  Description of Artificial Sequence: Synthetic primer
gttcccagggaccacagtctcagagcgacagacacaacag

SEQ ID NO: 25310 - DNA, 40 bp, Artificial Sequence
  Description of Artificial Sequence: Synthetic primer
tttcgccaagttcatatcctgtgaaaaactgttgttaatg

SEQ ID NO: 25311 - DNA, 40 bp, Artificial Sequence
  Description of Artificial Sequence: Synthetic primer
ggctttcacccaccacccgctgcctgtgcttgctggagtc

SEQ ID NO: 25312 - DNA, 40 bp, Artificial Sequence
  Description of Artificial Sequence: Synthetic primer
aagggcctaagggtgaaaacggtgttgttggtcccacagg

SEQ ID NO: 25313 - DNA, 40 bp, Artificial Sequence
  Description of Artificial Sequence: Synthetic primer
agacctgaaagcccttcattcagtgcagtgttcaccttcc

SEQ ID NO: 25314 - DNA, 40 bp, Artificial Sequence
  Description of Artificial Sequence: Synthetic primer
cagcagatcttagtgcccagcaaccaagttgttgttcaag

SEQ ID NO: 25315 - DNA, 40 bp, Artificial Sequence
  Description of Artificial Sequence: Synthetic primer
aactgtttatgagaggcttgtgtctgttgcacatttcttg

SEQ ID NO: 25316 - DNA, 40 bp, Artificial Sequence
  Description of Artificial Sequence: Synthetic primer
acaatgtaccctggaagttgtgtgaaaaagaatattgatg

SEQ ID NO: 25317 - DNA, 40 bp, Artificial Sequence
  Description of Artificial Sequence: Synthetic primer
agtttcaccgctcgatcttgggacccaccgctgccctcag

SEQ ID NO: 25318 - DNA, 40 bp, Artificial Sequence
  Description of Artificial Sequence: Synthetic primer
tttttgaccgagcagtcacctgtattgcattctcaaaatc

SEQ ID NO: 25319 - DNA, 40 bp, Artificial Sequence
  Description of Artificial Sequence: Synthetic primer
aaatttattttctaaattgctgtgatacttttcttacagt

SEQ ID NO: 25320 - DNA, 40 bp, Artificial Sequence
  Description of Artificial Sequence: Synthetic primer
cctttatataatactcctaaatgatatctggggagggaat

SEQ ID NO: 25321 - DNA, 40 bp, Artificial Sequence
  Description of Artificial Sequence: Synthetic primer
tttctttctgtccaagctctactgcccctctgatactagc

SEQ ID NO: 25322 - DNA, 40 bp, Artificial Sequence
  Description of Artificial Sequence: Synthetic primer
tgcgtcacgtggtccaagattcagttcttccaaatcagtg

SEQ ID NO: 25323 - DNA, 40 bp, Artificial Sequence
  Description of Artificial Sequence: Synthetic primer
ctgaactccatcgccatcttcttcccttaactccaagaac

SEQ ID NO: 25324 - DNA, 40 bp, Artificial Sequence
  Description of Artificial Sequence: Synthetic primer
tggattaaaatgtctgcatcatttctttagttatccagtt

SEQ ID NO: 25325 - DNA, 40 bp, Artificial Sequence
  Description of Artificial Sequence: Synthetic primer
attgagaaaattagtaaaaataccaggtatacacatggcc

SEQ ID NO: 25326 - DNA, 40 bp, Artificial Sequence
  Description of Artificial Sequence: Synthetic primer
ggtcccttcacccatcactcctattcttggaccccaaagc

SEQ ID NO: 25327 - DNA, 40 bp, Artificial Sequence
  Description of Artificial Sequence: Synthetic primer
cgcccctgaccatcgaaaaactgtgcatctacaccgacca

SEQ ID NO: 25328 - DNA, 40 bp, Artificial Sequence
  Description of Artificial Sequence: Synthetic primer
ccatcaaatacagatcttccagctaatccatgtcttccag

SEQ ID NO: 25329 - DNA, 40 bp, Artificial Sequence
  Description of Artificial Sequence: Synthetic primer
agcattttccttcttcagtttgaacagcctcaggtacagc

SEQ ID NO: 25330 - DNA, 40 bp, Artificial Sequence
  Description of Artificial Sequence: Synthetic primer
gatagggtgagactgcattgttacccataaccacatgacc

SEQ ID NO: 25331 - DNA, 40 bp, Artificial Sequence
  Description of Artificial Sequence: Synthetic primer
tctcaaaattgcccgtcagcaaagcctgagtaattaaacc

SEQ ID NO: 25332 - DNA, 40 bp, Artificial Sequence
  Description of Artificial Sequence: Synthetic primer
cccctccacagccaccacctcctccttcggtaccacaaac

SEQ ID NO: 25333 - DNA, 40 bp, Artificial Sequence
  Description of Artificial Sequence: Synthetic primer
ttattcatgaatagcacagttgtgactgtgaagtgaggtc

SEQ ID NO: 25334 - DNA, 40 bp, Artificial Sequence
  Description of Artificial Sequence: Synthetic primer
aacatgcttatcgactgtgagaaccagtgtgtcatcatta

SEQ ID NO: 25335 - DNA, 40 bp, Artificial Sequence
  Description of Artificial Sequence: Synthetic primer
ccagaagaacaagaacatatgagaagatggctgcatgaac

SEQ ID NO: 25336 - DNA, 40 bp, Artificial Sequence
  Description of Artificial Sequence: Synthetic primer
ttcagtatatcctgaagctacgcaaagaattacaactagg

SEQ ID NO: 25337 - DNA, 40 bp, Artificial Sequence
  Description of Artificial Sequence: Synthetic primer
actgagcagcggtgccctgccggacactgctggcgggggc

SEQ ID NO: 25338 - DNA, 40 bp, Artificial Sequence
  Description of Artificial Sequence: Synthetic primer
ttcggacttggtctccccatgtggtccaagccagcactcc

SEQ ID NO: 25339 - DNA, 40 bp, Artificial Sequence
  Description of Artificial Sequence: Synthetic primer
cttcatcaaactgggtcttatattgagggaggccaatgtc

SEQ ID NO: 25340 - DNA, 40 bp, Artificial Sequence
  Description of Artificial Sequence: Synthetic primer
gcggctgagcagcggcctggagcagcagagccaggctttg

SEQ ID NO: 25341 - DNA, 40 bp, Artificial Sequence
  Description of Artificial Sequence: Synthetic primer
cgatgatgaacagtatgcttgggagtcttctgctggaggt

SEQ ID NO: 25342 - DNA, 40 bp, Artificial Sequence
  Description of Artificial Sequence: Synthetic primer
gacacacacacagacacacaaatattcatgcgttataccc

SEQ ID NO: 25343 - DNA, 40 bp, Artificial Sequence
  Description of Artificial Sequence: Synthetic primer
ttttttggcttagttggggataaaataatttatttgtaag

SEQ ID NO: 25344 - DNA, 40 bp, Artificial Sequence
  Description of Artificial Sequence: Synthetic primer
ttcccggccgctctggtgcacttgggagccgaggagccgg

SEQ ID NO: 25345 - DNA, 40 bp, Artificial Sequence
  Description of Artificial Sequence: Synthetic primer
acaggaagaagaggacttctcgttacttctcaaggacttc

SEQ ID NO: 25346 - DNA, 40 bp, Artificial Sequence
  Description of Artificial Sequence: Synthetic primer
accccctccccagcttccctgtggctgtgcggtgcccttg

SEQ ID NO: 25347 - DNA, 40 bp, Artificial Sequence
  Description of Artificial Sequence: Synthetic primer
tcctggctcaagcacaacttgggaaggctccatcagcatc

SEQ ID NO: 25348 - DNA, 40 bp, Artificial Sequence
  Description of Artificial Sequence: Synthetic primer
taagccaccaaccagtatgttcgctagcactttctttatg

SEQ ID NO: 25349 - DNA, 40 bp, Artificial Sequence
  Description of Artificial Sequence: Synthetic primer
aatgtgtatgtgttctgaggcgtgacacatgatacagttc

SEQ ID NO: 25350 - DNA, 40 bp, Artificial Sequence
  Description of Artificial Sequence: Synthetic primer
aaacgtaatcagtttaaaagcataattatctgatctggtc

SEQ ID NO: 25351 - DNA, 40 bp, Artificial Sequence
  Description of Artificial Sequence: Synthetic primer
tgactgaccgggggcgggccaggtctggtggtgcctggtg

SEQ ID NO: 25352 - DNA, 40 bp, Artificial Sequence
  Description of Artificial Sequence: Synthetic primer
tgaaaataaaccaacatgaaactcaaaaagcattactagc

SEQ ID NO: 25353 - DNA, 40 bp, Artificial Sequence
  Description of Artificial Sequence: Synthetic primer
cgacagccagaagcccgcacgcacctcgcaccatgagatg

SEQ ID NO: 25354 - DNA, 40 bp, Artificial Sequence
  Description of Artificial Sequence: Synthetic primer
ctccatcggctgcaggtgccagtttaggccaaacaggtgc

SEQ ID NO: 25355 - DNA, 40 bp, Artificial Sequence
  Description of Artificial Sequence: Synthetic primer
atattagtaccagaagtagatactataaatcttgttattt

SEQ ID NO: 25356 - DNA, 40 bp, Artificial Sequence
  Description of Artificial Sequence: Synthetic primer
ggtgttttaaaattaaaatctttgggctgcatacatttac

SEQ ID NO: 25357 - DNA, 40 bp, Artificial Sequence
  Description of Artificial Sequence: Synthetic primer
aattgtgccattgttcagtttttagaaaaggataattttc

SEQ ID NO: 25358 - DNA, 40 bp, Artificial Sequence
  Description of Artificial Sequence: Synthetic primer
ccatctcgctcaggtacgagggacgtgtgtatcactacag

SEQ ID NO: 25359 - DNA, 40 bp, Artificial Sequence
  Description of Artificial Sequence: Synthetic primer
ttgctagaaccaaatgcagatgttccaaatgcccctccac

SEQ ID NO: 25360 - DNA, 40 bp, Artificial Sequence
  Description of Artificial Sequence: Synthetic primer
cagcttcgtcccggagtctcctgatggccaggaaaagaag

SEQ ID NO: 25361 - DNA, 40 bp, Artificial Sequence
  Description of Artificial Sequence: Synthetic primer
taactactcctattaggggagcttaacttgggtaaagtca

SEQ ID NO: 25362 - DNA, 40 bp, Artificial Sequence
  Description of Artificial Sequence: Synthetic primer
ttcgaaggttggcctatctgatggtctcagggccaagcac

SEQ ID NO: 25363 - DNA, 40 bp, Artificial Sequence
  Description of Artificial Sequence: Synthetic primer
ttaaaagttagtgaaatggacagtgagagacttcagtatg

SEQ ID NO: 25364 - DNA, 40 bp, Artificial Sequence
  Description of Artificial Sequence: Synthetic primer
gtcttaatgcagtatagttaaaatggcttcccacagggta

SEQ ID NO: 25365 - DNA, 40 bp, Artificial Sequence
  Description of Artificial Sequence: Synthetic primer
gaataatcagaagagcgagcccctgattggaaggaaaaag

SEQ ID NO: 25366 - DNA, 40 bp, Artificial Sequence
  Description of Artificial Sequence: Synthetic primer
tttcctcttgcttctctcgctcatctctgtccctctgctc

SEQ ID NO: 25367 - DNA, 40 bp, Artificial Sequence
  Description of Artificial Sequence: Synthetic primer
ttagtataatttataatggcagacaaaaatgaatcttcag

SEQ ID NO: 25368 - DNA, 40 bp, Artificial Sequence
  Description of Artificial Sequence: Synthetic primer
gcttccggggccacacgcctcttgacctcacttgcagcac

SEQ ID NO: 25369 - DNA, 40 bp, Artificial Sequence
  Description of Artificial Sequence: Synthetic primer
ttcggtcagagccacttctaggtctcccacgaggttttcg

SEQ ID NO: 25370 - DNA, 40 bp, Artificial Sequence
  Description of Artificial Sequence: Synthetic primer
cccttgaggatccccagacccactccaaccgcatctatcg

SEQ ID NO: 25371 - DNA, 40 bp, Artificial Sequence
  Description of Artificial Sequence: Synthetic primer
gaggctgaggcacggggagccagccccactcggggaccag

SEQ ID NO: 25372 - DNA, 40 bp, Artificial Sequence
  Description of Artificial Sequence: Synthetic primer
cttcccttattaaaaacatgcagagcagccacgcctactg

SEQ ID NO: 25373 - DNA, 40 bp, Artificial Sequence
  Description of Artificial Sequence: Synthetic primer
tctgcccggggtgggatgatcccacatcctcagtcccggg

SEQ ID NO: 25374 - DNA, 40 bp, Artificial Sequence
  Description of Artificial Sequence: Synthetic primer
tgagggacatgccagacccccttctcaccagggagctgta

SEQ ID NO: 25375 - DNA, 40 bp, Artificial Sequence
  Description of Artificial Sequence: Synthetic primer
cagctgggttcctgtttcaaggccaggcttctctaacttg

SEQ ID NO: 25376 - DNA, 40 bp, Artificial Sequence
  Description of Artificial Sequence: Synthetic primer
ccccgtcctcccctttcccgggttccagctccggcctctg

SEQ ID NO: 25377 - DNA, 40 bp, Artificial Sequence
  Description of Artificial Sequence: Synthetic primer
gaactgtatgcagattccagtcagctcagccgggagcaac

SEQ ID NO: 25378 - DNA, 40 bp, Artificial Sequence
  Description of Artificial Sequence: Synthetic primer
aaaacttctaattttggaagcaaccggttaatgaattttt

SEQ ID NO: 25379 - DNA, 40 bp, Artificial Sequence
  Description of Artificial Sequence: Synthetic primer
gtagtcggacaatttccaagtgatcgttctcaacagcatc

SEQ ID NO: 25380 - DNA, 40 bp, Artificial Sequence
  Description of Artificial Sequence: Synthetic primer
ggaatgcgaggaaggggaaggccggacgattatccactgc

SEQ ID NO: 25381 - DNA, 40 bp, Artificial Sequence
  Description of Artificial Sequence: Synthetic primer
tttcaagttatacccttctggtcttttgtccctttcactg

SEQ ID NO: 25382 - DNA, 40 bp, Artificial Sequence
  Description of Artificial Sequence: Synthetic primer
ctgcaggcaacgggagacgcccccgcgcagcgcgagcgcc

SEQ ID NO: 25383 - DNA, 40 bp, Artificial Sequence
  Description of Artificial Sequence: Synthetic primer
cttgggttcaggacgtcaacgtagcgagctctggttcctg

SEQ ID NO: 25384 - DNA, 40 bp, Artificial Sequence
  Description of Artificial Sequence: Synthetic primer
tctttttgtatactaccatgccaactgtacacacatttac

SEQ ID NO: 25385 - DNA, 40 bp, Artificial Sequence
  Description of Artificial Sequence: Synthetic primer
ttctgtagggctaggctcggaagagccgccgctgttcacc

SEQ ID NO: 25386 - DNA, 40 bp, Artificial Sequence
  Description of Artificial Sequence: Synthetic primer
agtaacaaaaatataattatcaatatagctatcttattag

SEQ ID NO: 25387 - DNA, 40 bp, Artificial Sequence
  Description of Artificial Sequence: Synthetic primer
gcctgctgggggatcaaggtccccgcatccaggcctccag

SEQ ID NO: 25388 - DNA, 40 bp, Artificial Sequence
  Description of Artificial Sequence: Synthetic primer
aattcaaggtggaggagccattgtccagagggctattaag

SEQ ID NO: 25389 - DNA, 40 bp, Artificial Sequence
  Description of Artificial Sequence: Synthetic primer
gacatgtgcaatcaagtcttctgccctccactcaagttcg

SEQ ID NO: 25390 - DNA, 40 bp, Artificial Sequence
  Description of Artificial Sequence: Synthetic primer
gtccgagacagccgggaggagcctgggggctcctcaccac

SEQ ID NO: 25391 - DNA, 40 bp, Artificial Sequence
  Description of Artificial Sequence: Synthetic primer
agatgtgaggcagggagagaggaggcaacagagtatgaat

SEQ ID NO: 25392 - DNA, 40 bp, Artificial Sequence
  Description of Artificial Sequence: Synthetic primer
ggcttcatcgtaagacatgtcctgggctgtgagcatcttc

SEQ ID NO: 25393 - DNA, 40 bp, Artificial Sequence
  Description of Artificial Sequence: Synthetic primer
acatgaattgcatatggattgttgatatgcttttagagtc

SEQ ID NO: 25394 - DNA, 40 bp, Artificial Sequence
  Description of Artificial Sequence: Synthetic primer
caggagttcaaggagagacagagcgaggcagcctttctgg

SEQ ID NO: 25395 - DNA, 40 bp, Artificial Sequence
  Description of Artificial Sequence: Synthetic primer
ctccaggaggctcctacggtcatctctccattggcaccat

SEQ ID NO: 25396 - DNA, 40 bp, Artificial Sequence
  Description of Artificial Sequence: Synthetic primer
ggcagcattggaggtgtggagccatacgtagatgtcacag

SEQ ID NO: 25397 - DNA, 40 bp, Artificial Sequence
  Description of Artificial Sequence: Synthetic primer
gcaaattgaagactttcgacaaggaagtgaaacaccaatg

SEQ ID NO: 25398 - DNA, 40 bp, Artificial Sequence
  Description of Artificial Sequence: Synthetic primer
cagggtcagcagcagagggcctggccagcttcggaaatac

SEQ ID NO: 25399 - DNA, 40 bp, Artificial Sequence
  Description of Artificial Sequence: Synthetic primer
tccccgtctgttcgaagactgcggaggcaccaaggagtgc

SEQ ID NO: 25400 - DNA, 40 bp, Artificial Sequence
  Description of Artificial Sequence: Synthetic primer
ctgcaaacgcaagaccaacgggggctgcccggtgtgcaag

SEQ ID NO: 25401 - DNA, 40 bp, Artificial Sequence
  Description of Artificial Sequence: Synthetic primer
agacaatgttctcaaagcatttacagtacctaaaaacagg

SEQ ID NO: 25402 - DNA, 40 bp, Artificial Sequence
  Description of Artificial Sequence: Synthetic primer
ttgactgctttcttgatttatacccccattatctgaagag

SEQ ID NO: 25403 - DNA, 40 bp, Artificial Sequence
  Description of Artificial Sequence: Synthetic primer
actgagagctatcagcatttgaaggcccagcccttgactc

SEQ ID NO: 25404 - DNA, 40 bp, Artificial Sequence
  Description of Artificial Sequence: Synthetic primer
agacagaaggaagtccctactccaatattcagttcattgc

SEQ ID NO: 25405 - DNA, 40 bp, Artificial Sequence
  Description of Artificial Sequence: Synthetic primer
agcatttcagctcaaaatgaacaattaagagctaagaatg

SEQ ID NO: 25406 - DNA, 40 bp, Artificial Sequence
  Description of Artificial Sequence: Synthetic primer
agtatctaaagaagggtcaattcttctttgcagtttactc

SEQ ID NO: 25407 - DNA, 40 bp, Artificial Sequence
  Description of Artificial Sequence: Synthetic primer
tcaaaattttgagaccaggacaagacttcctctgcagtgg

SEQ ID NO: 25408 - DNA, 40 bp, Artificial Sequence
  Description of Artificial Sequence: Synthetic primer
ttctatttaattttcctggcccttgtgcaaaaaattgtgg

SEQ ID NO: 25409 - DNA, 40 bp, Artificial Sequence
  Description of Artificial Sequence: Synthetic primer
atggccaggatgtccaggcgtgacagcttcttggcctgct

SEQ ID NO: 25410 - DNA, 40 bp, Artificial Sequence
  Description of Artificial Sequence: Synthetic primer
cctcaagacatcacttccacactccaccacctacgaatgc

SEQ ID NO: 25411 - DNA, 40 bp, Artificial Sequence
  Description of Artificial Sequence: Synthetic primer
taaaccccttcaaatagctttataaatgaagagcttccac

SEQ ID NO: 25412 - DNA, 40 bp, Artificial Sequence
  Description of Artificial Sequence: Synthetic primer
acagctagctgaagagaatgaacggctcaagcaggaaatc

SEQ ID NO: 25413 - DNA, 40 bp, Artificial Sequence
  Description of Artificial Sequence: Synthetic primer
caggaagggtgacagcgttggtgggcccacgtgctacaag

SEQ ID NO: 25414 - DNA, 40 bp, Artificial Sequence
  Description of Artificial Sequence: Synthetic primer
cccgtgccggccacaggctgcaggtcagcagggcgagcgc

SEQ ID NO: 25415 - DNA, 40 bp, Artificial Sequence
  Description of Artificial Sequence: Synthetic primer
ccatgtacagccacctccctgtcagcagcctcctcttctc

SEQ ID NO: 25416 - DNA, 40 bp, Artificial Sequence
  Description of Artificial Sequence: Synthetic primer
ctcctcttgctccagctgggccaattgggccaggcctgcc

SEQ ID NO: 25417 - DNA, 40 bp, Artificial Sequence
  Description of Artificial Sequence: Synthetic primer
ccattaaggcagactagggttcatgtctttttacccttta

SEQ ID NO: 25418 - DNA, 40 bp, Artificial Sequence
  Description of Artificial Sequence: Synthetic primer
gggtagagaagtactggaaccccttcaggtcagcggacag

SEQ ID NO: 25419 - DNA, 40 bp, Artificial Sequence
  Description of Artificial Sequence: Synthetic primer
gttctatcaaccccaccagagttccctaaacttgcttcag

SEQ ID NO: 25420 - DNA, 40 bp, Artificial Sequence
  Description of Artificial Sequence: Synthetic primer
ttgtaaatgcatctgatgtcgacaatgtgaaagcccattt

SEQ ID NO: 25421 - DNA, 40 bp, Artificial Sequence
  Description of Artificial Sequence: Synthetic primer
taatgttgaaaattcaaatggagacataaagaaatcagtg

SEQ ID NO: 25422 - DNA, 40 bp, Artificial Sequence
  Description of Artificial Sequence: Synthetic primer
aaaaacccttaatcctgtcttcaatgagcaatttactttc

SEQ ID NO: 25423 - DNA, 40 bp, Artificial Sequence
  Description of Artificial Sequence: Synthetic primer
gccgcggtctgggtgccgcctcggccgcggccgctctccc

SEQ ID NO: 25424 - DNA, 40 bp, Artificial Sequence
  Description of Artificial Sequence: Synthetic primer
tccaaaaaagatcgttctcaatgtgtcgtctgactcaacc

SEQ ID NO: 25425 - DNA, 40 bp, Artificial Sequence
  Description of Artificial Sequence: Synthetic primer
gtgaccttttaggccttacccgtaagctattttaatacac

SEQ ID NO: 25426 - DNA, 40 bp, Artificial Sequence
  Description of Artificial Sequence: Synthetic primer
ccggctgggcatgtccagctctaacagcacaatgttttct

SEQ ID NO: 25427 - DNA, 40 bp, Artificial Sequence
  Description of Artificial Sequence: Synthetic primer
ctttcgcctgaatatacagggtttagaaagaacactacag

SEQ ID NO: 25428 - DNA, 40 bp, Artificial Sequence
  Description of Artificial Sequence: Synthetic primer
ccagctccccctactccctgctgtgaaacaatccctctcc

SEQ ID NO: 25429 - DNA, 40 bp, Artificial Sequence
  Description of Artificial Sequence: Synthetic primer
tggagaattcggacacattcaaaaagactgcaccaaagtg

SEQ ID NO: 25430 - DNA, 40 bp, Artificial Sequence
  Description of Artificial Sequence: Synthetic primer
atcacagacactggggtcgtctgccacaagctcgccacac

SEQ ID NO: 25431 - DNA, 40 bp, Artificial Sequence
  Description of Artificial Sequence: Synthetic primer
agccgagaaggaggacctcctgcagcagatgctggaaagg

SEQ ID NO: 25432 - DNA, 40 bp, Artificial Sequence
  Description of Artificial Sequence: Synthetic primer
gtagcaaggaggactttagagcctcttcctctactcttag

SEQ ID NO: 25433 - DNA, 40 bp, Artificial Sequence
  Description of Artificial Sequence: Synthetic primer
attttcaaatgttcttttttaaagaacatataaaattaag

SEQ ID NO: 25434 - DNA, 40 bp, Artificial Sequence
  Description of Artificial Sequence: Synthetic primer
aaggttaagtcaagtgagaacgatgagaaatagggagatg

SEQ ID NO: 25435 - DNA, 40 bp, Artificial Sequence
  Description of Artificial Sequence: Synthetic primer
atttggattgataggaatgttcacataaacaccagcagtg

SEQ ID NO: 25436 - DNA, 40 bp, Artificial Sequence
  Description of Artificial Sequence: Synthetic primer
agctcagatatcgggctgaacggtcaaagacattcacaac

SEQ ID NO: 25437 - DNA, 40 bp, Artificial Sequence
  Description of Artificial Sequence: Synthetic primer
ttctgttttgtgaaaggaggaaggacttaggccagaaaac

SEQ ID NO: 25438 - DNA, 40 bp, Artificial Sequence
  Description of Artificial Sequence: Synthetic primer
ccatgattgtcaagtttaagttgcagtattgatgccacag

SEQ ID NO: 25439 - DNA, 40 bp, Artificial Sequence
  Description of Artificial Sequence: Synthetic primer
cttcagcagcagggctctcctccccatcactctgtgctac

SEQ ID NO: 25440 - DNA, 40 bp, Artificial Sequence
  Description of Artificial Sequence: Synthetic primer
tttttttaatatccagaagattgaacagagggttgctatt

SEQ ID NO: 25441 - DNA, 40 bp, Artificial Sequence
  Description of Artificial Sequence: Synthetic primer
accaggccatgagtgtggcctcagagatagcaaactgctc

SEQ ID NO: 25442 - DNA, 40 bp, Artificial Sequence
  Description of Artificial Sequence: Synthetic primer
cttcatgttcagtgtcatcttgcaggtctcgcaatggaag

SEQ ID NO: 25443 - DNA, 40 bp, Artificial Sequence
  Description of Artificial Sequence: Synthetic primer
gaaggaccttcagtgcagatcaggtgcagtaatggctttc

SEQ ID NO: 25444 - DNA, 40 bp, Artificial Sequence
  Description of Artificial Sequence: Synthetic primer
ctggctcaccttcaccttcagcctgcaaaagaagttcgag

SEQ ID NO: 25445 - DNA, 40 bp, Artificial Sequence
  Description of Artificial Sequence: Synthetic primer
tttgcattttgtatccttttctcaatcaagaaaaaaattc

SEQ ID NO: 25446 - DNA, 40 bp, Artificial Sequence
  Description of Artificial Sequence: Synthetic primer
ctaccctgtgccagaaaagcctcattcgttgtgcttgaac

SEQ ID NO: 25447 - DNA, 40 bp, Artificial Sequence
  Description of Artificial Sequence: Synthetic primer
atcaagtggttaggcccgtattttattgcatcgtagaagg

SEQ ID NO: 25448 - DNA, 40 bp, Artificial Sequence
  Description of Artificial Sequence: Synthetic primer
gacaaggtcctccagaaggcatgaaccagcaatattaccc

SEQ ID NO: 25449 - DNA, 40 bp, Artificial Sequence
  Description of Artificial Sequence: Synthetic primer
ccatgtaactgaggaatggcgtgacctgcaaagtgctgag

SEQ ID NO: 25450 - DNA, 40 bp, Artificial Sequence
  Description of Artificial Sequence: Synthetic primer
gtggctaaagtaacaaagtcctttaatttaaaaaaggtac

SEQ ID NO: 25451 - DNA, 40 bp, Artificial Sequence
  Description of Artificial Sequence: Synthetic primer
tattctggaggtgggaaggacttggagagagttaagaaac

SEQ ID NO: 25452 - DNA, 40 bp, Artificial Sequence
  Description of Artificial Sequence: Synthetic primer
gatgtttcaaagcctcaatgcatgttttgtatcctgaaag

SEQ ID NO: 25453 - DNA, 40 bp, Artificial Sequence
  Description of Artificial Sequence: Synthetic primer
ggcgacgagcacagacacctcagccgccgcagccatcttg

SEQ ID NO: 25454 - DNA, 40 bp, Artificial Sequence
  Description of Artificial Sequence: Synthetic primer
tccacagacgtctatggggtccagtgtgtgttacaatttc

SEQ ID NO: 25455 - DNA, 40 bp, Artificial Sequence
  Description of Artificial Sequence: Synthetic primer
aggcacacacatacacatattttcagtgaaatatattctg

SEQ ID NO: 25456 - DNA, 40 bp, Artificial Sequence
  Description of Artificial Sequence: Synthetic primer
ggagaatgactttcggcaagatctgcagccaggagagcag

SEQ ID NO: 25457 - DNA, 40 bp, Artificial Sequence
  Description of Artificial Sequence: Synthetic primer
ttatatgcaaatattttctgcctcttcttttgttctgttt

SEQ ID NO: 25458 - DNA, 40 bp, Artificial Sequence
  Description of Artificial Sequence: Synthetic primer
gcaaagtgcacctcttctcatacccctgctcgcagttcag

SEQ ID NO: 25459 - DNA, 40 bp, Artificial Sequence
  Description of Artificial Sequence: Synthetic primer
tcctccatgatgcgccactcactccccagcatctttgtag

SEQ ID NO: 25460 - DNA, 40 bp, Artificial Sequence
  Description of Artificial Sequence: Synthetic primer
attttgaagactgtggaaaggaaggctatgggtttgtttg

SEQ ID NO: 25461 - DNA, 40 bp, Artificial Sequence
  Description of Artificial Sequence: Synthetic primer
ttcaaacttgccgcccgtctccggtctggaaaggcaggtg

SEQ ID NO: 25462 - DNA, 40 bp, Artificial Sequence
  Description of Artificial Sequence: Synthetic primer
tccgggctcggtctctgcagcctttgttacttgccccaac

SEQ ID NO: 25463 - DNA, 40 bp, Artificial Sequence
  Description of Artificial Sequence: Synthetic primer
ccaactactcaaggagctccaagaaccagttcatttacac

SEQ ID NO: 25464 - DNA, 40 bp, Artificial Sequence
  Description of Artificial Sequence: Synthetic primer
acagctgccaggccccttgaggctaagcattctgctgata

SEQ ID NO: 25465 - DNA, 40 bp, Artificial Sequence
  Description of Artificial Sequence: Synthetic primer
taacccagactcacataagaggaaaggatcgccatgtgac

SEQ ID NO: 25466 - DNA, 40 bp, Artificial Sequence
  Description of Artificial Sequence: Synthetic primer
tgctgcgcgcctgctggaggacctgatggacgagctgctg

SEQ ID NO: 25467 - DNA, 40 bp, Artificial Sequence
  Description of Artificial Sequence: Synthetic primer
gaacattcacttttatcatatatgaatttgataatcctcc

SEQ ID NO: 25468 - DNA, 40 bp, Artificial Sequence
  Description of Artificial Sequence: Synthetic primer
ctggacgtggtcagctccttcacgaggatttcccggtagt

SEQ ID NO: 25469 - DNA, 40 bp, Artificial Sequence
  Description of Artificial Sequence: Synthetic primer
cctcttcacatcactgtccaacagagccggaaagctacag

SEQ ID NO: 25470 - DNA, 40 bp, Artificial Sequence
  Description of Artificial Sequence: Synthetic primer
ttcaagccaggaaaatttgtgaccaccttgtttgttaatc

SEQ ID NO: 25471 - DNA, 40 bp, Artificial Sequence
  Description of Artificial Sequence: Synthetic primer
aaagcgtcacttggggaaaacaaggtggacccgggaagag

SEQ ID NO: 25472 - DNA, 40 bp, Artificial Sequence
  Description of Artificial Sequence: Synthetic primer
gagggcaagaagatatgaacctgagccttcagtcaagacc

SEQ ID NO: 25473 - DNA, 40 bp, Artificial Sequence
  Description of Artificial Sequence: Synthetic primer
ttggcacttatgctggcaaactgagcttctttcccttgag

SEQ ID NO: 25474 - DNA, 40 bp, Artificial Sequence
  Description of Artificial Sequence: Synthetic primer
ctcagtgtggctcagggaggtcagggggtccctcaagtgc

SEQ ID NO: 25475 - DNA, 40 bp, Artificial Sequence
  Description of Artificial Sequence: Synthetic primer
tcgaagatggaggctgatgagtgctgctcatttcccgaac

SEQ ID NO: 25476 - DNA, 40 bp, Artificial Sequence
  Description of Artificial Sequence: Synthetic primer
gcacagaaaatggagacgcacccagagaaagaggctcatc

SEQ ID NO: 25477 - DNA, 40 bp, Artificial Sequence
  Description of Artificial Sequence: Synthetic primer
ttacaagcagtgtaacccccggactcgaaacatggacctg

SEQ ID NO: 25478 - DNA, 40 bp, Artificial Sequence
  Description of Artificial Sequence: Synthetic primer
aatgagaactctgtcagactgagtctcaaaacttgcttgg

SEQ ID NO: 25479 - DNA, 40 bp, Artificial Sequence
  Description of Artificial Sequence: Synthetic primer
cctggaagagattgaatgcacagaagaagaaatgatgatg

SEQ ID NO: 25480 - DNA, 40 bp, Artificial Sequence
  Description of Artificial Sequence: Synthetic primer
tgtttgaaggaatgaaacacattgggcagatatatcataa

SEQ ID NO: 25481 - DNA, 40 bp, Artificial Sequence
  Description of Artificial Sequence: Synthetic primer
cccactgtccatcagccccggccaggcctggtccctcaac

SEQ ID NO: 25482 - DNA, 40 bp, Artificial Sequence
  Description of Artificial Sequence: Synthetic primer
tgcagaaattcataggtgaggttgtgccgtgtgatgatcc

SEQ ID NO: 25483 - DNA, 40 bp, Artificial Sequence
  Description of Artificial Sequence: Synthetic primer
ctcatcctcccttgagtctgtacgagtgcctgctttctgc

SEQ ID NO: 25484 - DNA, 40 bp, Artificial Sequence
  Description of Artificial Sequence: Synthetic primer
tgacctggcaatattttggcagtgcaactggattcttcag

SEQ ID NO: 25485 - DNA, 40 bp, Artificial Sequence
  Description of Artificial Sequence: Synthetic primer
gggccgtgaacgaaagcagtgacggaggagcttgtaccac

SEQ ID NO: 25486 - DNA, 40 bp, Artificial Sequence
  Description of Artificial Sequence: Synthetic primer
agtaaaatagagaatatgcaaaatttgtctttaagattgg

SEQ ID NO: 25487 - DNA, 40 bp, Artificial Sequence
  Description of Artificial Sequence: Synthetic primer
attctccagaatgattaaattctactgtagaaattatatc

SEQ ID NO: 25488 - DNA, 40 bp, Artificial Sequence
  Description of Artificial Sequence: Synthetic primer
cagtagttgggcgccctttcttgtcagcctgcagattttc

SEQ ID NO: 25489 - DNA, 40 bp, Artificial Sequence
  Description of Artificial Sequence: Synthetic primer
attagaaaagttatcaaatcttttcacagtatcagatttg

SEQ ID NO: 25490 - DNA, 40 bp, Artificial Sequence
  Description of Artificial Sequence: Synthetic primer
gcctacgtccgctgcatcaaacccaatgatgccaaacagc

SEQ ID NO: 25491 - DNA, 40 bp, Artificial Sequence
  Description of Artificial Sequence: Synthetic primer
aagggatttcattacttctgttcgtggtgtccccgatgtc

SEQ ID NO: 25492 - DNA, 40 bp, Artificial Sequence
  Description of Artificial Sequence: Synthetic primer
atgaatcctattgctcttgggagccgctggcttgcttatg

SEQ ID NO: 25493 - DNA, 40 bp, Artificial Sequence
  Description of Artificial Sequence: Synthetic primer
atgtcagataccactaaaaggcagagggggagaaagtgac

SEQ ID NO: 25494 - DNA, 40 bp, Artificial Sequence
  Description of Artificial Sequence: Synthetic primer
gagggttgcatagtctagaaaggagtgtgacctgacagtg

SEQ ID NO: 25495 - DNA, 40 bp, Artificial Sequence
  Description of Artificial Sequence: Synthetic primer
tcctggcaggcttgggtccccttcctatcgcaggggttgg

SEQ ID NO: 25496 - DNA, 40 bp, Artificial Sequence
  Description of Artificial Sequence: Synthetic primer
ttctctactttttcgtgtgctccctggatattcttagtag

SEQ ID NO: 25497 - DNA, 40 bp, Artificial Sequence
  Description of Artificial Sequence: Synthetic primer
acaaattctggagtctgaaaggggaagtgaaaaagaaatg

SEQ ID NO: 25498 - DNA, 40 bp, Artificial Sequence
  Description of Artificial Sequence: Synthetic primer
ggtgggtgagaagggcagttgagatggcagcattgatatg

SEQ ID NO: 25499 - DNA, 40 bp, Artificial Sequence
  Description of Artificial Sequence: Synthetic primer
cctaaactcacagaactgaggccagaatttaaacagaacc

SEQ ID NO: 25500 - DNA, 40 bp, Artificial Sequence
  Description of Artificial Sequence: Synthetic primer
cagaatcgtctctttacagactgcatctaaccccatcgag

SEQ ID NO: 25501 - DNA, 40 bp, Artificial Sequence
  Description of Artificial Sequence: Synthetic primer
cagcttgccaactccccagaatacccccaaggaggccaac

SEQ ID NO: 25502 - DNA, 40 bp, Artificial Sequence
  Description of Artificial Sequence: Synthetic primer
tgcatcttagcatgcaaatcataattttaagcaatataaa

SEQ ID NO: 25503 - DNA, 40 bp, Artificial Sequence
  Description of Artificial Sequence: Synthetic primer
cagattgcctactgcaacctcctgccgagggaccagtttc

SEQ ID NO: 25504 - DNA, 40 bp, Artificial Sequence
  Description of Artificial Sequence: Synthetic primer
caggaagatagacgcattttaatgtgaagaggaataagag

SEQ ID NO: 25505 - DNA, 40 bp, Artificial Sequence
  Description of Artificial Sequence: Synthetic primer
cacttactgaaatcctgatagccaggtgaataactttgac

SEQ ID NO: 25506 - DNA, 40 bp, Artificial Sequence
  Description of Artificial Sequence: Synthetic primer
atccgggaggccaacgggatcgtggagtgcgggccctgcc

SEQ ID NO: 25507 - DNA, 40 bp, Artificial Sequence
  Description of Artificial Sequence: Synthetic primer
ggggtaccttgttcagtctagaggagggttcgtccttctg

SEQ ID NO: 25508 - DNA, 40 bp, Artificial Sequence
  Description of Artificial Sequence: Synthetic primer
gacagttcttttgccagttgagtaataagcgtaaccagac

SEQ ID NO: 25509 - DNA, 40 bp, Artificial Sequence
  Description of Artificial Sequence: Synthetic primer
ggaggaaatggcagcagaagccgcagctctgcgggtctac

SEQ ID NO: 25510 - DNA, 40 bp, Artificial Sequence
  Description of Artificial Sequence: Synthetic primer
cttctgtgttgaaatgaagtacttaaaattaccgttatac

SEQ ID NO: 25511 - DNA, 40 bp, Artificial Sequence
  Description of Artificial Sequence: Synthetic primer
tcttgctgactgcacaggacagggggcagcccgcctcctc

SEQ ID NO: 25512 - DNA, 40 bp, Artificial Sequence
  Description of Artificial Sequence: Synthetic primer
aggtctacagtatgtagaagcagaagttagtattaatgag

SEQ ID NO: 25513 - DNA, 40 bp, Artificial Sequence
  Description of Artificial Sequence: Synthetic primer
agttcctgggagcagaggggcgaatgaggcgggggatttc

SEQ ID NO: 25514 - DNA, 40 bp, Artificial Sequence
  Description of Artificial Sequence: Synthetic primer
atgagggtgtggataagtgcttagggtggcgcgccttctg

SEQ ID NO: 25515 - DNA, 40 bp, Artificial Sequence
  Description of Artificial Sequence: Synthetic primer
ctgcatcgcacgcagcccttgcattcagcaggacacattc

SEQ ID NO: 25516 - DNA, 40 bp, Artificial Sequence
  Description of Artificial Sequence: Synthetic primer
tgtccagtgtcaagcaggccttgtttgtaatggtctcatc

SEQ ID NO: 25517 - DNA, 40 bp, Artificial Sequence
  Description of Artificial Sequence: Synthetic primer
cctttccttcacctcctgcccttctcttaccttttcagtg

SEQ ID NO: 25518 - DNA, 40 bp, Artificial Sequence
  Description of Artificial Sequence: Synthetic primer
gttgtattaagtttgatgaagctaaaattagggaactctg

SEQ ID NO: 25519 - DNA, 40 bp, Artificial Sequence
  Description of Artificial Sequence: Synthetic primer
aaacacctatgatgccactttaactggaagtaatggagac

SEQ ID NO: 25520 - DNA, 40 bp, Artificial Sequence
  Description of Artificial Sequence: Synthetic primer
tggaaatgtctgcagcccaagccattcaatgggatcttcg

SEQ ID NO: 25521 - DNA, 40 bp, Artificial Sequence
  Description of Artificial Sequence: Synthetic primer
agacaaaaacctttccaagcaagcatgggacaccaagaag

SEQ ID NO: 25522 - DNA, 40 bp, Artificial Sequence
  Description of Artificial Sequence: Synthetic primer
agagacagtgggagggagtttcactgatacgttctgcatc

SEQ ID NO: 25523 - DNA, 40 bp, Artificial Sequence
  Description of Artificial Sequence: Synthetic primer
cattttagggaagaagtcactgaaagaagggccagaaagc

SEQ ID NO: 25524 - DNA, 40 bp, Artificial Sequence
  Description of Artificial Sequence: Synthetic primer
gaaagaccatgaagaatacaacattggcgtcctagacatc

SEQ ID NO: 25525 - DNA, 40 bp, Artificial Sequence
  Description of Artificial Sequence: Synthetic primer
ttttccagttttgcaaccgttctctctgcaaattcagcac

SEQ ID NO: 25526 - DNA, 40 bp, Artificial Sequence
  Description of Artificial Sequence: Synthetic primer
tatcgagccacaaacaacaacaagacattcattcccaacg

SEQ ID NO: 25527 - DNA, 40 bp, Artificial Sequence
  Description of Artificial Sequence: Synthetic primer
gcagaatgggacttgagagacattgattttgttgaagatg

SEQ ID NO: 25528 - DNA, 40 bp, Artificial Sequence
  Description of Artificial Sequence: Synthetic primer
atgccaattataaagcgtttgctatgtctggcctaaaagg

SEQ ID NO: 25529 - DNA, 40 bp, Artificial Sequence
  Description of Artificial Sequence: Synthetic primer
agacgggggtcaggcggcttcttttccctccgtgctccac

SEQ ID NO: 25530 - DNA, 40 bp, Artificial Sequence
  Description of Artificial Sequence: Synthetic primer
tcagtacttctttgattgctgtaatgatgtactcctgcac

SEQ ID NO: 25531 - DNA, 40 bp, Artificial Sequence
  Description of Artificial Sequence: Synthetic primer
gtgatgcctgtggccaggaaggcttcagacctctcatctg

SEQ ID NO: 25532 - DNA, 40 bp, Artificial Sequence
  Description of Artificial Sequence: Synthetic primer
aggattcttctcaaggctgattaggtagcgactaacttgg

SEQ ID NO: 25533 - DNA, 40 bp, Artificial Sequence
  Description of Artificial Sequence: Synthetic primer
ttctcaaactgaccagtgatgtcaacaggagcgcgaagga

SEQ ID NO: 25534 - DNA, 40 bp, Artificial Sequence
  Description of Artificial Sequence: Synthetic primer
ccacaggtatctcttgtgcacttggtggtggaacaaaagc

SEQ ID NO: 25535 - DNA, 40 bp, Artificial Sequence
  Description of Artificial Sequence: Synthetic primer
ttccctacttgcagcgccaagtggccactggcatcgcagc

SEQ ID NO: 25536 - DNA, 40 bp, Artificial Sequence
  Description of Artificial Sequence: Synthetic primer
aagtagagattatttcacttcattaaacttttgaagtcct

SEQ ID NO: 25537 - DNA, 40 bp, Artificial Sequence
  Description of Artificial Sequence: Synthetic primer
ttgtctttcctcttcagcctgggcctgtgcctgggggttg

SEQ ID NO: 25538 - DNA, 40 bp, Artificial Sequence
  Description of Artificial Sequence: Synthetic primer
atttgcaccctatattttgacctgtcgttaggtactgttg

SEQ ID NO: 25539 - DNA, 40 bp, Artificial Sequence
  Description of Artificial Sequence: Synthetic primer
gccaaggccatagctgccgagcaaagaggaacagacatgc

SEQ ID NO: 25540 - DNA, 40 bp, Artificial Sequence
  Description of Artificial Sequence: Synthetic primer
ggtcgctggtggacgagcggatgccagtcccgcagctgtt

SEQ ID NO: 25541 - DNA, 40 bp, Artificial Sequence
  Description of Artificial Sequence: Synthetic primer
gaaagcactatgaatttgtccatttaaaaatgatctgtag

SEQ ID NO: 25542 - DNA, 40 bp, Artificial Sequence
  Description of Artificial Sequence: Synthetic primer
tagtgatgatggcatgaaacttataggacccctttatcac

SEQ ID NO: 25543 - DNA, 40 bp, Artificial Sequence
  Description of Artificial Sequence: Synthetic primer
cataatttattatctcaccacaaggcacaatacacagagc

SEQ ID NO: 25544 - DNA, 40 bp, Artificial Sequence
  Description of Artificial Sequence: Synthetic primer
ccagtttaatcctcggacctgataatctctcagtttaccc

SEQ ID NO: 25545 - DNA, 40 bp, Artificial Sequence
  Description of Artificial Sequence: Synthetic primer
atatttaaaatttacacttctaagactagagacccacatt

SEQ ID NO: 25546 - DNA, 40 bp, Artificial Sequence
  Description of Artificial Sequence: Synthetic primer
ggagtcattgggaaggaaaagtggagaaatggcaagtcta

SEQ ID NO: 25547 - DNA, 40 bp, Artificial Sequence
  Description of Artificial Sequence: Synthetic primer
ttactatggtaactgctgttcatcatgggctgtgtcattc

SEQ ID NO: 25548 - DNA, 40 bp, Artificial Sequence
  Description of Artificial Sequence: Synthetic primer
catctcactgtcatcgatggacttggggcgcttggtggtg

SEQ ID NO: 25549 - DNA, 40 bp, Artificial Sequence
  Description of Artificial Sequence: Synthetic primer
ggactttaaagttacaatcaacggctgagaggcacaaaag

SEQ ID NO: 25550 - DNA, 40 bp, Artificial Sequence
  Description of Artificial Sequence: Synthetic primer
aatcttctcgttcaccatcagtaacaacgctgccattaag

SEQ ID NO: 25551 - DNA, 40 bp, Artificial Sequence
  Description of Artificial Sequence: Synthetic primer
cacggccttctgcagctccgtcatcgcctggcgcttcacc

SEQ ID NO: 25552 - DNA, 40 bp, Artificial Sequence
  Description of Artificial Sequence: Synthetic primer
ggaatttgtcgagaaatcattcttgcacattggaaaaacc

SEQ ID NO: 25553 - DNA, 40 bp, Artificial Sequence
  Description of Artificial Sequence: Synthetic primer
tgctgtttatatttggaatgtcatcaggtgcatacttatc

SEQ ID NO: 25554 - DNA, 40 bp, Artificial Sequence
  Description of Artificial Sequence: Synthetic primer
caagggaagaaagggccaaacaaaaagctagagaaggaac

SEQ ID NO: 25555 - DNA, 40 bp, Artificial Sequence
  Description of Artificial Sequence: Synthetic primer
cttccgcctcaggctcggggctgcagcagaagctgaagcg

SEQ ID NO: 25556 - DNA, 40 bp, Artificial Sequence
  Description of Artificial Sequence: Synthetic primer
ttcacgatgcaggtgacattgacctgggtcccatggccac

SEQ ID NO: 25557 - DNA, 40 bp, Artificial Sequence
  Description of Artificial Sequence: Synthetic primer
tgaaaaatagagctgatcaccgttccagccccaacgtagc

SEQ ID NO: 25558 - DNA, 40 bp, Artificial Sequence
  Description of Artificial Sequence: Synthetic primer
tgtctagcatgatgtcaatcacaatgtagcagccagttcg

SEQ ID NO: 25559 - DNA, 40 bp, Artificial Sequence
  Description of Artificial Sequence: Synthetic primer
attgtacttctagtttttccttcattaatttttctgtctc

SEQ ID NO: 25560 - DNA, 40 bp, Artificial Sequence
  Description of Artificial Sequence: Synthetic primer
ttgcattcattcctccaagagaagttcatattctcacagg

SEQ ID NO: 25561 - DNA, 40 bp, Artificial Sequence
  Description of Artificial Sequence: Synthetic primer
ccgccgggcaagccccccagctccagcccgctcaccgggg

SEQ ID NO: 25562 - DNA, 40 bp, Artificial Sequence
  Description of Artificial Sequence: Synthetic primer
acagagcagctctgtgttcacgtcggccttgacccccctg

SEQ ID NO: 25563 - DNA, 40 bp, Artificial Sequence
  Description of Artificial Sequence: Synthetic primer
tgtggtcactcagcagatggccagcatgggcagcagctgc

SEQ ID NO: 25564 - DNA, 40 bp, Artificial Sequence
  Description of Artificial Sequence: Synthetic primer
ttcccaggagagttaagacaccaaccacaacataaaagtc

SEQ ID NO: 25565 - DNA, 40 bp, Artificial Sequence
  Description of Artificial Sequence: Synthetic primer
tgtagcaaatgggtttattgaggaaataattcattttaag

SEQ ID NO: 25566 - DNA, 40 bp, Artificial Sequence
  Description of Artificial Sequence: Synthetic primer
tcggaggtcgtcccaagcccctacccgggcggcccctgcg

SEQ ID NO: 25567 - DNA, 40 bp, Artificial Sequence
  Description of Artificial Sequence: Synthetic primer
actgcaagtgaccatcatcactcagagtgactatcactcc

SEQ ID NO: 25568 - DNA, 40 bp, Artificial Sequence
  Description of Artificial Sequence: Synthetic primer
ccaccagtacaacgactgggtcttcttggggaatctgtag

SEQ ID NO: 25569 - DNA, 40 bp, Artificial Sequence
  Description of Artificial Sequence: Synthetic primer
acaaggcagcagcccctgcctccaggagaactctgcagac

SEQ ID NO: 25570 - DNA, 40 bp, Artificial Sequence
  Description of Artificial Sequence: Synthetic primer
ccacaataactgtattgttgagaccagcacaagccaaagg

SEQ ID NO: 25571 - DNA, 40 bp, Artificial Sequence
  Description of Artificial Sequence: Synthetic primer
tctcgagttcccgcaactcgtgcagagccgtgctcatggt

SEQ ID NO: 25572 - DNA, 40 bp, Artificial Sequence
  Description of Artificial Sequence: Synthetic primer
aaatctgtaattaaaagcaactgttcccaatcatgtcagg

SEQ ID NO: 25573 - DNA, 40 bp, Artificial Sequence
  Description of Artificial Sequence: Synthetic primer
ctacctaagacaagaagtgataggagaccaggcggataag

SEQ ID NO: 25574 - DNA, 40 bp, Artificial Sequence
  Description of Artificial Sequence: Synthetic primer
gcttacttggcctatcttgacccggtactcgtgactctgg

SEQ ID NO: 25575 - DNA, 40 bp, Artificial Sequence
  Description of Artificial Sequence: Synthetic primer
cataggaggtggagaaggagtttgtgatggtggtgctgga

SEQ ID NO: 25576 - DNA, 40 bp, Artificial Sequence
  Description of Artificial Sequence: Synthetic primer
cagtggaatttatcaacaatttatcaccctgcccctgctc

SEQ ID NO: 25577 - DNA, 40 bp, Artificial Sequence
  Description of Artificial Sequence: Synthetic primer
gtttcacagaggactttgccgagcatttatggacctcacc

SEQ ID NO: 25578 - DNA, 40 bp, Artificial Sequence
  Description of Artificial Sequence: Synthetic primer
ccgcccgcaccacagaccttcgcctcgccccgccggttcc

SEQ ID NO: 25579 - DNA, 40 bp, Artificial Sequence
  Description of Artificial Sequence: Synthetic primer
agcgcgcagtgtcgactccccggtctatgccaggcgcatc

SEQ ID NO: 25580 - DNA, 40 bp, Artificial Sequence
  Description of Artificial Sequence: Synthetic primer
gccattgagggctccaatgtcaatatattcatcagcttcc

SEQ ID NO: 25581 - DNA, 40 bp, Artificial Sequence
  Description of Artificial Sequence: Synthetic primer
cgactcagagattgggggcatcaccattgcccatgtcatc

SEQ ID NO: 25582 - DNA, 40 bp, Artificial Sequence
  Description of Artificial Sequence: Synthetic primer
tggacatggtgtatgcaagtggccaggctgtgaagcagtg

SEQ ID NO: 25583 - DNA, 40 bp, Artificial Sequence
  Description of Artificial Sequence: Synthetic primer
gctgcttagcaaaatcgaagcccttcacactagggatctg

SEQ ID NO: 25584 - DNA, 40 bp, Artificial Sequence
  Description of Artificial Sequence: Synthetic primer
ttccatataaggagccccattacataagctacgggtgagg

SEQ ID NO: 25585 - DNA, 40 bp, Artificial Sequence
  Description of Artificial Sequence: Synthetic primer
actgtcaggggcgttgccagtgatgtgcccgtatgcgatg

SEQ ID NO: 25586 - DNA, 40 bp, Artificial Sequence
  Description of Artificial Sequence: Synthetic primer
gccttcggtcaatatcacagtgtacatcaggagtctcaag

SEQ ID NO: 25587 - DNA, 40 bp, Artificial Sequence
  Description of Artificial Sequence: Synthetic primer
gtcaccctggaggaggccattgcagaacagaacgaaagtg

SEQ ID NO: 25588 - DNA, 40 bp, Artificial Sequence
  Description of Artificial Sequence: Synthetic primer
attctgcgggtgcagttaaatgatggctgcggggcatttg

SEQ ID NO: 25589 - DNA, 40 bp, Artificial Sequence
  Description of Artificial Sequence: Synthetic primer
ccctggaatatgtcttcaaggtgcaggaagtccaagagag

SEQ ID NO: 25590 - DNA, 40 bp, Artificial Sequence
  Description of Artificial Sequence: Synthetic primer
ccaatgactggaccaatcattcctattgcattcaaactac

SEQ ID NO: 25591 - DNA, 40 bp, Artificial Sequence
  Description of Artificial Sequence: Synthetic primer
ctggaatttctgctgctgaatttttgggagattcttgagc

SEQ ID NO: 25592 - DNA, 40 bp, Artificial Sequence
  Description of Artificial Sequence: Synthetic primer
atgttctctgctgaagagactgaagtggagaactcacaga

SEQ ID NO: 25593 - DNA, 40 bp, Artificial Sequence
  Description of Artificial Sequence: Synthetic primer
ttatgaaacagaatgactgtgatctttgatccgagaaatc

SEQ ID NO: 25594 - DNA, 40 bp, Artificial Sequence
  Description of Artificial Sequence: Synthetic primer
gctctttgtgttgtagacttgctaaaggagaagtctggtg

SEQ ID NO: 25595 - DNA, 40 bp, Artificial Sequence
  Description of Artificial Sequence: Synthetic primer
tactgacgattgcgctccataagtttctcagagatgtcac

SEQ ID NO: 25596 - DNA, 40 bp, Artificial Sequence
  Description of Artificial Sequence: Synthetic primer
atcctgtgcgtctgtggatcccgcagaggtgtctgaaaag

SEQ ID NO: 25597 - DNA, 40 bp, Artificial Sequence
  Description of Artificial Sequence: Synthetic primer
catggtaaaagcagaatcatatgattctgtgatttcttcc

SEQ ID NO: 25598 - DNA, 40 bp, Artificial Sequence
  Description of Artificial Sequence: Synthetic primer
catcagagttagaaatgttaagactggctttcttgaatac

SEQ ID NO: 25599 - DNA, 40 bp, Artificial Sequence
  Description of Artificial Sequence: Synthetic primer
ccgcacgctgtacatgaagcacaaaaagactgtcgctcag

SEQ ID NO: 25600 - DNA, 40 bp, Artificial Sequence
  Description of Artificial Sequence: Synthetic primer
ctttttgtaagaatactgtataacctggcattcagcagtg

SEQ ID NO: 25601 - DNA, 40 bp, Artificial Sequence
  Description of Artificial Sequence: Synthetic primer
ttcttacagcttggaagcaaaagtagaacttccaaccaag

SEQ ID NO: 25602 - DNA, 40 bp, Artificial Sequence
  Description of Artificial Sequence: Synthetic primer
ctgggaacggcgttcacacagcatcaccgacctgtcatta

SEQ ID NO: 25603 - DNA, 40 bp, Artificial Sequence
  Description of Artificial Sequence: Synthetic primer
agcctgtcatgagacctccaaacccctttggccctgtatc

SEQ ID NO: 25604 - DNA, 40 bp, Artificial Sequence
  Description of Artificial Sequence: Synthetic primer
tcaggtctgtggcctccccggggcgcagacactcctcatc

SEQ ID NO: 25605 - DNA, 40 bp, Artificial Sequence
  Description of Artificial Sequence: Synthetic primer
taccaagatggcgtgccgcatttctggagggttgccacag

SEQ ID NO: 25606 - DNA, 40 bp, Artificial Sequence
  Description of Artificial Sequence: Synthetic primer
tttttcctggctttgcttacgacaacgtctccgcagtcta

SEQ ID NO: 25607 - DNA, 40 bp, Artificial Sequence
  Description of Artificial Sequence: Synthetic primer
cagtaatatcctttcaatgtgttttatattgttttgactg

SEQ ID NO: 25608 - DNA, 40 bp, Artificial Sequence
  Description of Artificial Sequence: Synthetic primer
ctaccccgggagcggcttcgccttctacagcctggactac

SEQ ID NO: 25609 - DNA, 40 bp, Artificial Sequence
  Description of Artificial Sequence: Synthetic primer
catgcagactctcttccgaggcaacagcttggccagtaaa

SEQ ID NO: 25610 - DNA, 40 bp, Artificial Sequence
  Description of Artificial Sequence: Synthetic primer
gttgaagctgcaactgttcctgttgttttttataaaactc

SEQ ID NO: 25611 - DNA, 40 bp, Artificial Sequence
  Description of Artificial Sequence: Synthetic primer
ccctctaatctgcgaaagcaaatcagttgccggcctaacc

SEQ ID NO: 25612 - DNA, 40 bp, Artificial Sequence
  Description of Artificial Sequence: Synthetic primer
agagattgccagttgggtcccatttgatagcatttacttc

SEQ ID NO: 25613 - DNA, 40 bp, Artificial Sequence
  Description of Artificial Sequence: Synthetic primer
attgtggagaatgagtacggcagcatcaaccacacatacc

SEQ ID NO: 25614 - DNA, 40 bp, Artificial Sequence
  Description of Artificial Sequence: Synthetic primer
cccgtcgtcgcggcccctcgcctggctccccgcgctccac

SEQ ID NO: 25615 - DNA, 40 bp, Artificial Sequence
  Description of Artificial Sequence: Synthetic primer
ggagacgcgggccttcgagcagctcatgaccgacctcacc

SEQ ID NO: 25616 - DNA, 40 bp, Artificial Sequence
  Description of Artificial Sequence: Synthetic primer
cgggacaactccaccatgggctatatgatggccaaaaagc

SEQ ID NO: 25617 - DNA, 40 bp, Artificial Sequence
  Description of Artificial Sequence: Synthetic primer
aaccttcctatccacagagtagagctgcattgctccaacc

SEQ ID NO: 25618 - DNA, 40 bp, Artificial Sequence
  Description of Artificial Sequence: Synthetic primer
acggtcgattaaaaaaattattttgttacttcgaagtatg

SEQ ID NO: 25619 - DNA, 40 bp, Artificial Sequence
  Description of Artificial Sequence: Synthetic primer
caagtatactagaggcacagggggcccggctcataaaaac

SEQ ID NO: 25620 - DNA, 40 bp, Artificial Sequence
  Description of Artificial Sequence: Synthetic primer
gcaccactccactcaagagctgctcaacaccaccatggac

SEQ ID NO: 25621 - DNA, 40 bp, Artificial Sequence
  Description of Artificial Sequence: Synthetic primer
ttctttctctgcttgtcgatattgtctgtgtgattcagag

SEQ ID NO: 25622 - DNA, 40 bp, Artificial Sequence
  Description of Artificial Sequence: Synthetic primer
caacactggaggctgaagggcctctgcgtgacagggtctc

SEQ ID NO: 25623 - DNA, 40 bp, Artificial Sequence
  Description of Artificial Sequence: Synthetic primer
ttcagggtaagacactgaactagaattaccacatttaacc

SEQ ID NO: 25624 - DNA, 40 bp, Artificial Sequence
  Description of Artificial Sequence: Synthetic primer
ctactagatataccttgttagaaaatagtatcccttttag

SEQ ID NO: 25625 - DNA, 40 bp, Artificial Sequence
  Description of Artificial Sequence: Synthetic primer
gggaatcagaagaccaggttctgtcttctgctctgtctct

SEQ ID NO: 25626 - DNA, 40 bp, Artificial Sequence
  Description of Artificial Sequence: Synthetic primer
acagcaagccagccgggttctggctctaggaggtctctgg

SEQ ID NO: 25627 - DNA, 40 bp, Artificial Sequence
  Description of Artificial Sequence: Synthetic primer
caagaaagatgtcactagattctcttctatgtgatttttg

SEQ ID NO: 25628 - DNA, 40 bp, Artificial Sequence
  Description of Artificial Sequence: Synthetic primer
gaaaagatattcagtgcaaagttagattctgtgccacttc

SEQ ID NO: 25629 - DNA, 40 bp, Artificial Sequence
  Description of Artificial Sequence: Synthetic primer
aaagaatagtagaacgtgctgagatgaaactcagactgga

SEQ ID NO: 25630 - DNA, 40 bp, Artificial Sequence
  Description of Artificial Sequence: Synthetic primer
gcagtggttccatgaggcctgcacccagtgtctgagcaag

SEQ ID NO: 25631 - DNA, 40 bp, Artificial Sequence
  Description of Artificial Sequence: Synthetic primer
aatggggctatctggatttggccatttaggacactgaaag

SEQ ID NO: 25632 - DNA, 40 bp, Artificial Sequence
  Description of Artificial Sequence: Synthetic primer
tgcactgaggcctcagaatctgctctacccgacttaacag

SEQ ID NO: 25633 - DNA, 40 bp, Artificial Sequence
  Description of Artificial Sequence: Synthetic primer
tctttaaaacctcaaaaccatgaccatcctgtcaaagacc

SEQ ID NO: 25634 - DNA, 40 bp, Artificial Sequence
  Description of Artificial Sequence: Synthetic primer
taagctggaggagatgggcttcaaggacaccgaccctgac

SEQ ID NO: 25635 - DNA, 40 bp, Artificial Sequence
  Description of Artificial Sequence: Synthetic primer
cacgtgactgtggatctcaagtactaccggccaactgaag

SEQ ID NO: 25636 - DNA, 40 bp, Artificial Sequence
  Description of Artificial Sequence: Synthetic primer
cactttctcttagtgcttcttccagctcttcaatcctgtc

SEQ ID NO: 25637 - DNA, 40 bp, Artificial Sequence
  Description of Artificial Sequence: Synthetic primer
ttggaacacatatcacaacgtctaccaagtttatttccag

SEQ ID NO: 25638 - DNA, 40 bp, Artificial Sequence
  Description of Artificial Sequence: Synthetic primer
agattgattgaaacaccatctttcaggtagagaatcagac

SEQ ID NO: 25639 - DNA, 40 bp, Artificial Sequence
  Description of Artificial Sequence: Synthetic primer
attttccaaactgctgttgcctggttgatcatagcgaatc

SEQ ID NO: 25640 - DNA, 40 bp, Artificial Sequence
  Description of Artificial Sequence: Synthetic primer
ctgtgtaaagctggctgggggggccggctctgcgacaaag

SEQ ID NO: 25641 - DNA, 40 bp, Artificial Sequence
  Description of Artificial Sequence: Synthetic primer
gtaaaagagaaaggaaaatctcgagtctgactttatgtag

SEQ ID NO: 25642 - DNA, 40 bp, Artificial Sequence
  Description of Artificial Sequence: Synthetic primer
tttctcatatttgacaccatttggtccattgtctggaaag

SEQ ID NO: 25643 - DNA, 40 bp, Artificial Sequence
  Description of Artificial Sequence: Synthetic primer
gcgctccgagagcagcgaagcctcagtgccgggtgcgcgc

SEQ ID NO: 25644 - DNA, 40 bp, Artificial Sequence
  Description of Artificial Sequence: Synthetic primer
ccggaaaaaatccaggtcttccagccaatatatgtcttcc

SEQ ID NO: 25645 - DNA, 40 bp, Artificial Sequence
  Description of Artificial Sequence: Synthetic primer
caatactatttatatctgaatcaacagtagcataaacatt

SEQ ID NO: 25646 - DNA, 40 bp, Artificial Sequence
  Description of Artificial Sequence: Synthetic primer
ggtgtttacacgaagaaaactacaaagcttgtcttaatcg

SEQ ID NO: 25647 - DNA, 40 bp, Artificial Sequence
  Description of Artificial Sequence: Synthetic primer
cctgctcaatgcctcctccgacaagtttgtggccgacctg

SEQ ID NO: 25648 - DNA, 40 bp, Artificial Sequence
  Description of Artificial Sequence: Synthetic primer
aagaatctacttgactctgtccctggagtgaaatccttag

SEQ ID NO: 25649 - DNA, 40 bp, Artificial Sequence
  Description of Artificial Sequence: Synthetic primer
ctttttggtgtggaaggaaatgggactactgggctgttcg

SEQ ID NO: 25650 - DNA, 40 bp, Artificial Sequence
  Description of Artificial Sequence: Synthetic primer
tccatggggagctatggtccccaggggggtcagtatggcc

SEQ ID NO: 25651 - DNA, 40 bp, Artificial Sequence
  Description of Artificial Sequence: Synthetic primer
cggcgggtttgcatatatcagtggggccacccagccccta

SEQ ID NO: 25652 - DNA, 40 bp, Artificial Sequence
  Description of Artificial Sequence: Synthetic primer
aaaggaagaaagcacaggtcttgtgtagtatcttgattcc

SEQ ID NO: 25653 - DNA, 40 bp, Artificial Sequence
  Description of Artificial Sequence: Synthetic primer
ggtccgactggagctcaggctcgcgacccagactggtggg

SEQ ID NO: 25654 - DNA, 40 bp, Artificial Sequence
  Description of Artificial Sequence: Synthetic primer
gtgtagaccacgcggtacttgtccttggtccgagtcttac

SEQ ID NO: 25655 - DNA, 40 bp, Artificial Sequence
  Description of Artificial Sequence: Synthetic primer
cctcacccccttctacttacccccaaccccggaggctgtc

SEQ ID NO: 25656 - DNA, 40 bp, Artificial Sequence
  Description of Artificial Sequence: Synthetic primer
acccataagcccctcgcactctggtggcaggtgccttgtc

SEQ ID NO: 25657 - DNA, 40 bp, Artificial Sequence
  Description of Artificial Sequence: Synthetic primer
tgccgtcacggacacagagcgggacatgtccagggagttg

SEQ ID NO: 25658 - DNA, 40 bp, Artificial Sequence
  Description of Artificial Sequence: Synthetic primer
acaaaagattggcagtaatgaggatccatgtaaatcaaac

SEQ ID NO: 25659 - DNA, 40 bp, Artificial Sequence
  Description of Artificial Sequence: Synthetic primer
aagagggcctcgggctcacacacaaacttgtacacgtaac

SEQ ID NO: 25660 - DNA, 40 bp, Artificial Sequence
  Description of Artificial Sequence: Synthetic primer
ctccctttgggtgtatttaccttttcgcgggggaccagag

SEQ ID NO: 25661 - DNA, 40 bp, Artificial Sequence
  Description of Artificial Sequence: Synthetic primer
tatccaagacagtatgcaaggccacgacccacgagatcat

SEQ ID NO: 25662 - DNA, 40 bp, Artificial Sequence
  Description of Artificial Sequence: Synthetic primer
ctgtggctttgcaaaccacatacattattatcacttacag

SEQ ID NO: 25663 - DNA, 40 bp, Artificial Sequence
  Description of Artificial Sequence: Synthetic primer
gagatatttgtatttatttccagaccaataaatttgtaac

SEQ ID NO: 25664 - DNA, 40 bp, Artificial Sequence
  Description of Artificial Sequence: Synthetic primer
gcagccactcctgcacctccaggggtggacacccctcctc

SEQ ID NO: 25665 - DNA, 40 bp, Artificial Sequence
  Description of Artificial Sequence: Synthetic primer
accagtgtactttctaagtttcagaattaataccaaagag

SEQ ID NO: 25666 - DNA, 40 bp, Artificial Sequence
  Description of Artificial Sequence: Synthetic primer
cccatgatgaggcccccctttggagctgccgctgtacctg

SEQ ID NO: 25667 - DNA, 40 bp, Artificial Sequence
  Description of Artificial Sequence: Synthetic primer
gatgaagattttgagtatgggtcccagttgccagagtgtc

SEQ ID NO: 25668 - DNA, 40 bp, Artificial Sequence
  Description of Artificial Sequence: Synthetic primer
gtctcccctctgcccagagcacttgcagggaaccccacag

SEQ ID NO: 25669 - DNA, 40 bp, Artificial Sequence
  Description of Artificial Sequence: Synthetic primer
ctccagaaagggccaggcttcctgattggacggcactgac

SEQ ID NO: 25670 - DNA, 40 bp, Artificial Sequence
  Description of Artificial Sequence: Synthetic primer
cttggaagtgatcttgattcatctcttgccagcttagtag

SEQ ID NO: 25671 - DNA, 40 bp, Artificial Sequence
  Description of Artificial Sequence: Synthetic primer
cagataccaagtgaatatttttaattgttgctgatgcttg

SEQ ID NO: 25672 - DNA, 40 bp, Artificial Sequence
  Description of Artificial Sequence: Synthetic primer
ggaatgaaatccattcaggaaatatcgacagggctacacg

SEQ ID NO: 25673 - DNA, 40 bp, Artificial Sequence
  Description of Artificial Sequence: Synthetic primer
aaaccacataatctaaacagagcaaagctacaagaaataa

SEQ ID NO: 25674 - DNA, 40 bp, Artificial Sequence
  Description of Artificial Sequence: Synthetic primer
actaccctttctgctttggacgaagccctgcatggtggtg

SEQ ID NO: 25675 - DNA, 40 bp, Artificial Sequence
  Description of Artificial Sequence: Synthetic primer
caagtttttgctgttcagtctcctgccttttatctgcatc

SEQ ID NO: 25676 - DNA, 40 bp, Artificial Sequence
  Description of Artificial Sequence: Synthetic primer
gagcccatgaaggcttgtccccaacacctttcatgaactc

SEQ ID NO: 25677 - DNA, 40 bp, Artificial Sequence
  Description of Artificial Sequence: Synthetic primer
gtctggagacggtttttgctgaagagtaggtgaagatagc

SEQ ID NO: 25678 - DNA, 40 bp, Artificial Sequence
  Description of Artificial Sequence: Synthetic primer
cagatctgccagcgctctctctgccagtcgagccagccag

SEQ ID NO: 25679 - DNA, 40 bp, Artificial Sequence
  Description of Artificial Sequence: Synthetic primer
tcaagatgaaaacatgccaagtcagtaccttgcacagttg

SEQ ID NO: 25680 - DNA, 40 bp, Artificial Sequence
  Description of Artificial Sequence: Synthetic primer
ggaatattgtgtgggtattattggtggcaaacctaaacag

SEQ ID NO: 25681 - DNA, 40 bp, Artificial Sequence
  Description of Artificial Sequence: Synthetic primer
gggaaacatgggctatactcagagaagaccctctgcattg

SEQ ID NO: 25682 - DNA, 40 bp, Artificial Sequence
  Description of Artificial Sequence: Synthetic primer
ttggtgtggctcctggcgttggcgtggctcccggcattgg

SEQ ID NO: 25683 - DNA, 40 bp, Artificial Sequence
  Description of Artificial Sequence: Synthetic primer
gtgcacgtcttgtccaataaatcacgctgcagttggtgtc

SEQ ID NO: 25684 - DNA, 40 bp, Artificial Sequence
  Description of Artificial Sequence: Synthetic primer
ttaagattagaatatatgatccataaaaatttaaagtgag

SEQ ID NO: 25685 - DNA, 40 bp, Artificial Sequence
  Description of Artificial Sequence: Synthetic primer
atctccaacaatgagcaactgcccatgctgggccggcgcc

SEQ ID NO: 25686 - DNA, 40 bp, Artificial Sequence
  Description of Artificial Sequence: Synthetic primer
acacgttgtttaacttaagcaattttttggataaaagtgg

SEQ ID NO: 25687 - DNA, 40 bp, Artificial Sequence
  Description of Artificial Sequence: Synthetic primer
tatagatctcatttagtgttagctgcttttctggagattc

SEQ ID NO: 25688 - DNA, 40 bp, Artificial Sequence
  Description of Artificial Sequence: Synthetic primer
ttagttataggcaaaatactttcatatttttagattagac

SEQ ID NO: 25689 - DNA, 40 bp, Artificial Sequence
  Description of Artificial Sequence: Synthetic primer
cacatgggtggaggctctgggggtgcagccgggggctacg

SEQ ID NO: 25690 - DNA, 40 bp, Artificial Sequence
  Description of Artificial Sequence: Synthetic primer
gaggatcatgtaatgatctccgcaatgtggattggaataa

SEQ ID NO: 25691 - DNA, 40 bp, Artificial Sequence
  Description of Artificial Sequence: Synthetic primer
agtgatggctgtggcccacccctcggggtggagaaaaggg

SEQ ID NO: 25692 - DNA, 40 bp, Artificial Sequence
  Description of Artificial Sequence: Synthetic primer
cacgatgttatacagggtgatgaaatactggtcatagacg

SEQ ID NO: 25693 - DNA, 40 bp, Artificial Sequence
  Description of Artificial Sequence: Synthetic primer
caataattctgtttttgatccctaaaagtccaccctattc

SEQ ID NO: 25694 - DNA, 40 bp, Artificial Sequence
  Description of Artificial Sequence: Synthetic primer
gttattccagtgggactcaaaatgccaactacccagtgag

SEQ ID NO: 25695 - DNA, 40 bp, Artificial Sequence
  Description of Artificial Sequence: Synthetic primer
agactcatctgagctacattctgatgggcctccaagattc

SEQ ID NO: 25696 - DNA, 40 bp, Artificial Sequence
  Description of Artificial Sequence: Synthetic primer
tgctctgggtgcgctgggtgctccgcaggtgcagggtctg

SEQ ID NO: 25697 - DNA, 40 bp, Artificial Sequence
  Description of Artificial Sequence: Synthetic primer
ccgattaaagtctgcccggcgagtagcaaatgagaccttg

SEQ ID NO: 25698 - DNA, 40 bp, Artificial Sequence
  Description of Artificial Sequence: Synthetic primer
ggccacactttctggcagattagatagaatctcatacatc

SEQ ID NO: 25699 - DNA, 40 bp, Artificial Sequence
  Description of Artificial Sequence: Synthetic primer
gccagtatttcccctctcatacaaaccactctggattttc

SEQ ID NO: 25700 - DNA, 40 bp, Artificial Sequence
  Description of Artificial Sequence: Synthetic primer
gcaggaagagggcattgagaacagccaggagatcctgaag

SEQ ID NO: 25701 - DNA, 40 bp, Artificial Sequence
  Description of Artificial Sequence: Synthetic primer
acttcagacaacattgagacaaggtgtccgtggtcgtcag

SEQ ID NO: 25702 - DNA, 40 bp, Artificial Sequence
  Description of Artificial Sequence: Synthetic primer
tcaaaggcttggtggatttcagcaaaggagggccggtcag

SEQ ID NO: 25703 - DNA, 40 bp, Artificial Sequence
  Description of Artificial Sequence: Synthetic primer
tgctgctgcctaccctagtctcaccaatcgtggatctaac

SEQ ID NO: 25704 - DNA, 40 bp, Artificial Sequence
  Description of Artificial Sequence: Synthetic primer
aaatgtactgattgccaatacaccccaccctcattacatc

SEQ ID NO: 25705 - DNA, 40 bp, Artificial Sequence
  Description of Artificial Sequence: Synthetic primer
aaagtggcactgctcgagtcgaaatggttaattacctagc

SEQ ID NO: 25706 - DNA, 40 bp, Artificial Sequence
  Description of Artificial Sequence: Synthetic primer
tcttttaaagaactgtcttctagtaactagaagtgaaatg

SEQ ID NO: 25707 - DNA, 40 bp, Artificial Sequence
  Description of Artificial Sequence: Synthetic primer
gatttagtgaaattaactcaaaagagaaagctttggaaac

SEQ ID NO: 25708 - DNA, 40 bp, Artificial Sequence
  Description of Artificial Sequence: Synthetic primer
tgattctgttggccaaagagaccacctggatttgttccaa

SEQ ID NO: 25709 - DNA, 40 bp, Artificial Sequence
  Description of Artificial Sequence: Synthetic primer
tgaaaaaacagagaaaactcataaaggatcaaagaaacag

SEQ ID NO: 25710 - DNA, 40 bp, Artificial Sequence
  Description of Artificial Sequence: Synthetic primer
caaatagactttatgcaaaaacaaagaaatagaactgaag

SEQ ID NO: 25711 - DNA, 40 bp, Artificial Sequence
  Description of Artificial Sequence: Synthetic primer
cacttgtatgttctgtaaagtgtatttctactttggtagg

SEQ ID NO: 25712 - DNA, 40 bp, Artificial Sequence
  Description of Artificial Sequence: Synthetic primer
tctcggtccgcggcctggagcgggtgccgcgcgggcggcc

SEQ ID NO: 25713 - DNA, 40 bp, Artificial Sequence
  Description of Artificial Sequence: Synthetic primer
caagagccctccgggaaagagcagcctcggcctggacaac

SEQ ID NO: 25714 - DNA, 40 bp, Artificial Sequence
  Description of Artificial Sequence: Synthetic primer
ctccaacagtaatgggctcaaaaaccgcgttttgtaattg

SEQ ID NO: 25715 - DNA, 40 bp, Artificial Sequence
  Description of Artificial Sequence: Synthetic primer
acatctttttaggattctctttgaataggactcaagttgg

SEQ ID NO: 25716 - DNA, 40 bp, Artificial Sequence
  Description of Artificial Sequence: Synthetic primer
gaaaaaatcagcttagaaacacaacgatcagtgtgcaaga

SEQ ID NO: 25717 - DNA, 40 bp, Artificial Sequence
  Description of Artificial Sequence: Synthetic primer
ggagggggcggggcctgacattcatttttgggactgaatc

SEQ ID NO: 25718 - DNA, 40 bp, Artificial Sequence
  Description of Artificial Sequence: Synthetic primer
gctcgtgtgcttccggacatggtgtccctccgggtgatgg

SEQ ID NO: 25719 - DNA, 40 bp, Artificial Sequence
  Description of Artificial Sequence: Synthetic primer
ttactgttaaacctttgcagtattatgtctcttatttatt

SEQ ID NO: 25720 - DNA, 40 bp, Artificial Sequence
  Description of Artificial Sequence: Synthetic primer
gaaaaaactgaaaagatcatcagtgcagaactccaaaaag

SEQ ID NO: 25721 - DNA, 40 bp, Artificial Sequence
  Description of Artificial Sequence: Synthetic primer
taagttaatttggttttgtataaaaggcatggtaatctgg

SEQ ID NO: 25722 - DNA, 40 bp, Artificial Sequence
  Description of Artificial Sequence: Synthetic primer
cctgtaacacttgggtagtacctgctaggacaatttcttg

SEQ ID NO: 25723 - DNA, 40 bp, Artificial Sequence
  Description of Artificial Sequence: Synthetic primer
cctgcttctgccgactgaaccctccacgccgggcgtacac

SEQ ID NO: 25724 - DNA, 40 bp, Artificial Sequence
  Description of Artificial Sequence: Synthetic primer
gcctcgggacttgcagtccacgggaagacagtttgactcg

SEQ ID NO: 25725 - DNA, 40 bp, Artificial Sequence
  Description of Artificial Sequence: Synthetic primer
ccaggctgtgagaaagccttcacacaactctccaatctgc

SEQ ID NO: 25726 - DNA, 40 bp, Artificial Sequence
  Description of Artificial Sequence: Synthetic primer
gcttaatacatctacaaccattgtctcactggagactcac

SEQ ID NO: 25727 - DNA, 40 bp, Artificial Sequence
  Description of Artificial Sequence: Synthetic primer
ccatttttaaattccctccttccacttaaacttccacagt

SEQ ID NO: 25728 - DNA, 40 bp, Artificial Sequence
  Description of Artificial Sequence: Synthetic primer
attggtgatgtaaggaattatgttttcttcttccacacac

SEQ ID NO: 25729 - DNA, 40 bp, Artificial Sequence
  Description of Artificial Sequence: Synthetic primer
ttagtagattatctaaactacttgagccagcatcttccaa

SEQ ID NO: 25730 - DNA, 40 bp, Artificial Sequence
  Description of Artificial Sequence: Synthetic primer
ggttcctgcaaagggggtatggacgaaatgggtggtgtgg

SEQ ID NO: 25731 - DNA, 40 bp, Artificial Sequence
  Description of Artificial Sequence: Synthetic primer
cccagcacgggggaggtgcccaatcccatctccctactgc

SEQ ID NO: 25732 - DNA, 40 bp, Artificial Sequence
  Description of Artificial Sequence: Synthetic primer
gtccaaatgatattcatgatggtaataaacgagatgtttg

SEQ ID NO: 25733 - DNA, 40 bp, Artificial Sequence
  Description of Artificial Sequence: Synthetic primer
caacagaatgagaagctacaaacaagaaatgggaaaactc

SEQ ID NO: 25734 - DNA, 40 bp, Artificial Sequence
  Description of Artificial Sequence: Synthetic primer
gatgagagactgcgcatctttgctctgttggctggaaaac

SEQ ID NO: 25735 - DNA, 40 bp, Artificial Sequence
  Description of Artificial Sequence: Synthetic primer
ggggcacctgcctcgacctccccaacacctacaagtgctc

SEQ ID NO: 25736 - DNA, 40 bp, Artificial Sequence
  Description of Artificial Sequence: Synthetic primer
caacactgacaaagttcatttcaaaatatcccattcattc

SEQ ID NO: 25737 - DNA, 40 bp, Artificial Sequence
  Description of Artificial Sequence: Synthetic primer
tcagaggtcaacagcagaacagaggcaggtcagggttgtc

SEQ ID NO: 25738 - DNA, 40 bp, Artificial Sequence
  Description of Artificial Sequence: Synthetic primer
atgatgaaccaactcggccagggtgttgaagcggctctcg

SEQ ID NO: 25739 - DNA, 40 bp, Artificial Sequence
  Description of Artificial Sequence: Synthetic primer
ctgggggcaacactcccactcaaagcctgcaggctcaatg

SEQ ID NO: 25740 - DNA, 40 bp, Artificial Sequence
  Description of Artificial Sequence: Synthetic primer
actcactcccttactgctcctaggccctctggaagctcag

SEQ ID NO: 25741 - DNA, 40 bp, Artificial Sequence
  Description of Artificial Sequence: Synthetic primer
attagatcccatatttacttactgctatctactaagtttc

SEQ ID NO: 25742 - DNA, 40 bp, Artificial Sequence
  Description of Artificial Sequence: Synthetic primer
ggagcgcccagaaggctgcccagagaaggtctatgaactc

SEQ ID NO: 25743 - DNA, 40 bp, Artificial Sequence
  Description of Artificial Sequence: Synthetic primer
accctggcttggagctgtgtgttgtttgcagcaagagtgg

SEQ ID NO: 25744 - DNA, 40 bp, Artificial Sequence
  Description of Artificial Sequence: Synthetic primer
agaaatatgtaggagctgtccagatgctgaaaagagaagg

SEQ ID NO: 25745 - DNA, 40 bp, Artificial Sequence
  Description of Artificial Sequence: Synthetic primer
cactcgcagttctgctcgtcgttcccaggccggggtgtcc

SEQ ID NO: 25746 - DNA, 40 bp, Artificial Sequence
  Description of Artificial Sequence: Synthetic primer
atcctcctcacgttcttactcctgaaatgattccaccatc

SEQ ID NO: 25747 - DNA, 40 bp, Artificial Sequence
  Description of Artificial Sequence: Synthetic primer
ggggagacctcaagtccttcctccgagagacccgccctcg

SEQ ID NO: 25748 - DNA, 40 bp, Artificial Sequence
  Description of Artificial Sequence: Synthetic primer
ctggtctactgcgatgggcacgcgtgcagcgtggtcgtcc

SEQ ID NO: 25749 - DNA, 40 bp, Artificial Sequence
  Description of Artificial Sequence: Synthetic primer
ctcttaactgtggatcctggtcattttagtgaagtctttc

SEQ ID NO: 25750 - DNA, 40 bp, Artificial Sequence
  Description of Artificial Sequence: Synthetic primer
gttgcttgaggcgaaggttttccggggtgtccgccaccat

SEQ ID NO: 25751 - DNA, 40 bp, Artificial Sequence
  Description of Artificial Sequence: Synthetic primer
acacacatgcacacacacagcacccatgctatcaagacac

SEQ ID NO: 25752 - DNA, 40 bp, Artificial Sequence
  Description of Artificial Sequence: Synthetic primer
ctttttctgtgggaccattccattcaggagcaaagagcac

SEQ ID NO: 25753 - DNA, 40 bp, Artificial Sequence
  Description of Artificial Sequence: Synthetic primer
cagtcaacatgtggaaatccaaggaggacaaagactccag

SEQ ID NO: 25754 - DNA, 40 bp, Artificial Sequence
  Description of Artificial Sequence: Synthetic primer
atgggtcagggaaggtgaacatgaaacactgcacagtagg

SEQ ID NO: 25755 - DNA, 40 bp, Artificial Sequence
  Description of Artificial Sequence: Synthetic primer
actctggtattaccacgagaattgaaatttttaagcagaa

SEQ ID NO: 25756 - DNA, 40 bp, Artificial Sequence
  Description of Artificial Sequence: Synthetic primer
tatctttttcctttactcaaaacaaaacaatttttagcac

SEQ ID NO: 25757 - DNA, 40 bp, Artificial Sequence
  Description of Artificial Sequence: Synthetic primer
taaggatgtaaagattgagccctgtggacacctcatgtgc

SEQ ID NO: 25758 - DNA, 40 bp, Artificial Sequence
  Description of Artificial Sequence: Synthetic primer
cagtgacacttgagtcctatgctcagagaaaggtggatac

SEQ ID NO: 25759 - DNA, 40 bp, Artificial Sequence
  Description of Artificial Sequence: Synthetic primer
tcagtgaagttggtggcgtgaaaccaaccgtgtgacttgc

SEQ ID NO: 25760 - DNA, 40 bp, Artificial Sequence
  Description of Artificial Sequence: Synthetic primer
ctcttggctatactgtgaattactgaaatgttgaacaaac

SEQ ID NO: 25761 - DNA, 40 bp, Artificial Sequence
  Description of Artificial Sequence: Synthetic primer
tacagtcatcatattgtagtttttggaagggctcgttctg

SEQ ID NO: 25762 - DNA, 40 bp, Artificial Sequence
  Description of Artificial Sequence: Synthetic primer
aattcatcaagatccaagaaacccaaagggttagaactgg

SEQ ID NO: 25763 - DNA, 40 bp, Artificial Sequence
  Description of Artificial Sequence: Synthetic primer
cctattgattattcccttacatatttatttacaatttatc

SEQ ID NO: 25764 - DNA, 40 bp, Artificial Sequence
  Description of Artificial Sequence: Synthetic primer
cagcctacaagcaccatgaatccttctccaggtccctctg

SEQ ID NO: 25765 - DNA, 40 bp, Artificial Sequence
  Description of Artificial Sequence: Synthetic primer
cttcactgtcttccataggtgtataatctccctgggtaac

SEQ ID NO: 25766 - DNA, 40 bp, Artificial Sequence
  Description of Artificial Sequence: Synthetic primer
gattcacctgctcaggaccgcctccccagaaggcaagcac

SEQ ID NO: 25767 - DNA, 40 bp, Artificial Sequence
  Description of Artificial Sequence: Synthetic primer
acaacaggagttggcttgatattggctgttggtgggtctg

SEQ ID NO: 25768 - DNA, 40 bp, Artificial Sequence
  Description of Artificial Sequence: Synthetic primer
gacagttttacattctaaggcagttgtgtgacttctagtg

SEQ ID NO: 25769 - DNA, 40 bp, Artificial Sequence
  Description of Artificial Sequence: Synthetic primer
tccctgagccaggccccacccatcacagcattcccaggtc

SEQ ID NO: 25770 - DNA, 40 bp, Artificial Sequence
  Description of Artificial Sequence: Synthetic primer
attcaggaggcggccagtttagatgatccgatcaaccttg

SEQ ID NO: 25771 - DNA, 40 bp, Artificial Sequence
  Description of Artificial Sequence: Synthetic primer
tgaaatcagagaccagggcatgatgttgctaggattagag

SEQ ID NO: 25772 - DNA, 40 bp, Artificial Sequence
  Description of Artificial Sequence: Synthetic primer
tttcatggacacttttcaatgcgtatttttcaaatgcttc

SEQ ID NO: 25773 - DNA, 40 bp, Artificial Sequence
  Description of Artificial Sequence: Synthetic primer
acggccacagagggccagtaccagcctcagccttgagagg

SEQ ID NO: 25774 - DNA, 40 bp, Artificial Sequence
  Description of Artificial Sequence: Synthetic primer
caggacgttgaactctgacagcaggtctcgcagctcactc

SEQ ID NO: 25775 - DNA, 40 bp, Artificial Sequence
  Description of Artificial Sequence: Synthetic primer
tgacttaagaactgttaggaagaggactagaaaaggcttc

SEQ ID NO: 25776 - DNA, 40 bp, Artificial Sequence
  Description of Artificial Sequence: Synthetic primer
ccaactttcccctacccccaactttccccaccagctccac

SEQ ID NO: 25777 - DNA, 40 bp, Artificial Sequence
  Description of Artificial Sequence: Synthetic primer
tgcgcaggtaattctggagctgctttctccgttcctccac

SEQ ID NO: 25778 - DNA, 40 bp, Artificial Sequence
  Description of Artificial Sequence: Synthetic primer
caagccgacaagcagcccgagctacagctagaagatgaaa

SEQ ID NO: 25779 - DNA, 40 bp, Artificial Sequence
  Description of Artificial Sequence: Synthetic primer
tgcggaagcaggtcgcggcagtggctggccgggcagctgc

SEQ ID NO: 25780 - DNA, 40 bp, Artificial Sequence
  Description of Artificial Sequence: Synthetic primer
tcaccctcacattgctccccaggtggcagttttggcacag

SEQ ID NO: 25781 - DNA, 40 bp, Artificial Sequence
  Description of Artificial Sequence: Synthetic primer
gtagatgtgtaacctcttcaccttattcatggctgaagtc

SEQ ID NO: 25782 - DNA, 40 bp, Artificial Sequence
  Description of Artificial Sequence: Synthetic primer
aaaataattggaactcctgcttgcaagtgtcaacctaaaa

SEQ ID NO: 25783 - DNA, 40 bp, Artificial Sequence
  Description of Artificial Sequence: Synthetic primer
caatccttccagatgtcctgtgaaaatgtttgaatgctac

SEQ ID NO: 25784 - DNA, 40 bp, Artificial Sequence
  Description of Artificial Sequence: Synthetic primer
tttggcaatgagcgggccagcagctcaatagaggcgagaa

SEQ ID NO: 25785 - DNA, 40 bp, Artificial Sequence
  Description of Artificial Sequence: Synthetic primer
tcaagcttagctcctggccatcttaaagggctaatgtatg

SEQ ID NO: 25786 - DNA, 40 bp, Artificial Sequence
  Description of Artificial Sequence: Synthetic primer
ggcggggagtcacgttcctctggggccgcctcctcagctc

SEQ ID NO: 25787 - DNA, 40 bp, Artificial Sequence
  Description of Artificial Sequence: Synthetic primer
caggactgacctgtgctgacttccaacccgaccctgttgc

SEQ ID NO: 25788 - DNA, 40 bp, Artificial Sequence
  Description of Artificial Sequence: Synthetic primer
ctttatgttctccaaactcttccaaatggagtgacccaaa

SEQ ID NO: 25789 - DNA, 40 bp, Artificial Sequence
  Description of Artificial Sequence: Synthetic primer
tgactcctccccagccagcagctcccactcagccatcaac

SEQ ID NO: 25790 - DNA, 40 bp, Artificial Sequence
  Description of Artificial Sequence: Synthetic primer
aaagatacttgaagagtacttgaatacaaatcaaaatgac

SEQ ID NO: 25791 - DNA, 40 bp, Artificial Sequence
  Description of Artificial Sequence: Synthetic primer
tgagctcagtaagcttcttctctgcataaagctgattgag

SEQ ID NO: 25792 - DNA, 40 bp, Artificial Sequence
  Description of Artificial Sequence: Synthetic primer
gtacttctctctgtgttccttgagtgacaggtggtaaaac

SEQ ID NO: 25793 - DNA, 40 bp, Artificial Sequence
  Description of Artificial Sequence: Synthetic primer
ccagggcaaattcagatgacagccctggggaccccagaag

SEQ ID NO: 25794 - DNA, 40 bp, Artificial Sequence
  Description of Artificial Sequence: Synthetic primer
agccactccttacaaaaagttggggagccctggtgtattg

SEQ ID NO: 25795 - DNA, 40 bp, Artificial Sequence
  Description of Artificial Sequence: Synthetic primer
ttttggctattatgtctgatcgctgaaatggttcattacg

SEQ ID NO: 25796 - DNA, 40 bp, Artificial Sequence
  Description of Artificial Sequence: Synthetic primer
gaatatcacggtggtccctgtgccgtctacaggactgatg

SEQ ID NO: 25797 - DNA, 40 bp, Artificial Sequence
  Description of Artificial Sequence: Synthetic primer
caaggagctgaaacccggggaaaattcaccaagacagacc

SEQ ID NO: 25798 - DNA, 40 bp, Artificial Sequence
  Description of Artificial Sequence: Synthetic primer
aaacaaagaggaaaaaggcatacaggcagcgagcgctaag

SEQ ID NO: 25799 - DNA, 40 bp, Artificial Sequence
  Description of Artificial Sequence: Synthetic primer
gccgcccccagagccgctggatcgcatctgcctgggcgcc

SEQ ID NO: 25800 - DNA, 40 bp, Artificial Sequence
  Description of Artificial Sequence: Synthetic primer
accgctggctgggggatcagcgggagggctgggccagagg

SEQ ID NO: 25801 - DNA, 40 bp, Artificial Sequence
  Description of Artificial Sequence: Synthetic primer
aagatgtatcatgggtattggtgctgtgtaatgaacaacg

SEQ ID NO: 25802 - DNA, 40 bp, Artificial Sequence
  Description of Artificial Sequence: Synthetic primer
atactgcaaagtctaatatagcgaaaaagacaacaagctc

SEQ ID NO: 25803 - DNA, 40 bp, Artificial Sequence
  Description of Artificial Sequence: Synthetic primer
tctgtgtcattaaaaagaacaggaacatttcgcagacgag

SEQ ID NO: 25804 - DNA, 40 bp, Artificial Sequence
  Description of Artificial Sequence: Synthetic primer
tcaaggaacacaatttcagtttttaccccactttccaatc

SEQ ID NO: 25805 - DNA, 40 bp, Artificial Sequence
  Description of Artificial Sequence: Synthetic primer
aactagatactcttaacaatgaaatagttgacctacagag

SEQ ID NO: 25806 - DNA, 40 bp, Artificial Sequence
  Description of Artificial Sequence: Synthetic primer
tctggaaatccttccgggcagccagggtgggatccttcag

SEQ ID NO: 25807 - DNA, 40 bp, Artificial Sequence
  Description of Artificial Sequence: Synthetic primer
ggttcagtacctttaatttcacatcggcagaaaggacagc

SEQ ID NO: 25808 - DNA, 40 bp, Artificial Sequence
  Description of Artificial Sequence: Synthetic primer
tcaaattctcgtgccagggcagcaagaggaacccaaggtc

SEQ ID NO: 25809 - DNA, 40 bp, Artificial Sequence
  Description of Artificial Sequence: Synthetic primer
tgatctctctcgctgtgagacatgtctgagactcctgctc

SEQ ID NO: 25810 - DNA, 40 bp, Artificial Sequence
  Description of Artificial Sequence: Synthetic primer
cccgttgcgggcacagaagcggataggggagtggtcaaag

SEQ ID NO: 25811 - DNA, 40 bp, Artificial Sequence
  Description of Artificial Sequence: Synthetic primer
ctagtaaaatgtttatcggtggactgagctggcagacctc

SEQ ID NO: 25812 - DNA, 40 bp, Artificial Sequence
  Description of Artificial Sequence: Synthetic primer
tgaaaataaaatgctcttaaaacgaatgcaggccttggag

SEQ ID NO: 25813 - DNA, 40 bp, Artificial Sequence
  Description of Artificial Sequence: Synthetic primer
gtatccgtggggcaggcagcctagatctgatgggggaagc

SEQ ID NO: 25814 - DNA, 40 bp, Artificial Sequence
  Description of Artificial Sequence: Synthetic primer
ctgggctgtgatgtgaagacacctgcagcctttggtctcc

SEQ ID NO: 25815 - DNA, 40 bp, Artificial Sequence
  Description of Artificial Sequence: Synthetic primer
tgccagctggccggaaaaaactggagagacagattggttc

SEQ ID NO: 25816 - DNA, 40 bp, Artificial Sequence
  Description of Artificial Sequence: Synthetic primer
caacccccagcggccacggctccgggcgctcactgatgct

SEQ ID NO: 25817 - DNA, 40 bp, Artificial Sequence
  Description of Artificial Sequence: Synthetic primer
gagatctgaaaatataaacctatttctcatttccaaatac

SEQ ID NO: 25818 - DNA, 40 bp, Artificial Sequence
  Description of Artificial Sequence: Synthetic primer
ctttaacagataccctgccctgcacaaaccagagaaccag

SEQ ID NO: 25819 - DNA, 40 bp, Artificial Sequence
  Description of Artificial Sequence: Synthetic primer
ctattgcatgtaccttgttaatgaactacaggaatgcaca

SEQ ID NO: 25820 - DNA, 40 bp, Artificial Sequence
  Description of Artificial Sequence: Synthetic primer
gacgcatttaacatgcaaatgagacaacggaaaggcactc

SEQ ID NO: 25821 - DNA, 40 bp, Artificial Sequence
  Description of Artificial Sequence: Synthetic primer
aaaaccactcctagtgagcccaagaaaaagcagcctccac

SEQ ID NO: 25822 - DNA, 40 bp, Artificial Sequence
  Description of Artificial Sequence: Synthetic primer
gttaagttctgggctcgcgcttccactccgccgcgccttc

SEQ ID NO: 25823 - DNA, 40 bp, Artificial Sequence
  Description of Artificial Sequence: Synthetic primer
aggaaatggaagaatgtccaataagcaagaaaagagcaac

SEQ ID NO: 25824 - DNA, 40 bp, Artificial Sequence
  Description of Artificial Sequence: Synthetic primer
cttaattctaggcagtcttctcttgccccgcagtcccaac

SEQ ID NO: 25825 - DNA, 40 bp, Artificial Sequence
  Description of Artificial Sequence: Synthetic primer
tttattgttgatagcaaaatttccatttctatgtttttgc

SEQ ID NO: 25826 - DNA, 40 bp, Artificial Sequence
  Description of Artificial Sequence: Synthetic primer
gggagggtgctgcagagacagatgctgattcaggtttagg

SEQ ID NO: 25827 - DNA, 40 bp, Artificial Sequence
  Description of Artificial Sequence: Synthetic primer
ccctgtccctgcctcgggccttctcagcccagaaaagtgg

SEQ ID NO: 25828 - DNA, 40 bp, Artificial Sequence
  Description of Artificial Sequence: Synthetic primer
aaaagggatatcttttttatatttttttccatgaatctgc

SEQ ID NO: 25829 - DNA, 40 bp, Artificial Sequence
  Description of Artificial Sequence: Synthetic primer
caaagccctgcctctgtgtagccgccctgagagagaatag

SEQ ID NO: 25830 - DNA, 40 bp, Artificial Sequence
  Description of Artificial Sequence: Synthetic primer
tgaaacgttgatcacctttgaagcctgcatcattcacata

SEQ ID NO: 25831 - DNA, 40 bp, Artificial Sequence
  Description of Artificial Sequence: Synthetic primer
ccccatattccatgggtggaaccatggccaacaattctgc

SEQ ID NO: 25832 - DNA, 40 bp, Artificial Sequence
  Description of Artificial Sequence: Synthetic primer
ccggcggagtggagatcctattcagaggggccggtctctc

SEQ ID NO: 25833 - DNA, 40 bp, Artificial Sequence
  Description of Artificial Sequence: Synthetic primer
gttattttgttttgcagttcggggccaagctggagggaag

SEQ ID NO: 25834 - DNA, 40 bp, Artificial Sequence
  Description of Artificial Sequence: Synthetic primer
gtgctagtactatgtcaaagcaacagtccacactttgtcc

SEQ ID NO: 25835 - DNA, 40 bp, Artificial Sequence
  Description of Artificial Sequence: Synthetic primer
tcatctgtacttgagagagataatcgaagaatggaaatac

SEQ ID NO: 25836 - DNA, 40 bp, Artificial Sequence
  Description of Artificial Sequence: Synthetic primer
tttttgccttcgaatgcatatttaagagttaacagaatga

SEQ ID NO: 25837 - DNA, 40 bp, Artificial Sequence
  Description of Artificial Sequence: Synthetic primer
attctcactctaaaaatgctggtggcccgcacatgacagc

SEQ ID NO: 25838 - DNA, 40 bp, Artificial Sequence
  Description of Artificial Sequence: Synthetic primer
gctgaatttttctatgtttttaaaatgtttttatgctttt

SEQ ID NO: 25839 - DNA, 40 bp, Artificial Sequence
  Description of Artificial Sequence: Synthetic primer
tgtttctactcttcaagttaactattttaattagaatttt

SEQ ID NO: 25840 - DNA, 40 bp, Artificial Sequence
  Description of Artificial Sequence: Synthetic primer
ggcctactcatatgaaccaaatggtgtttcacaaaatcag

SEQ ID NO: 25841 - DNA, 40 bp, Artificial Sequence
  Description of Artificial Sequence: Synthetic primer
tttattttcaaaagtaattattataaaaaaatccttagtg

SEQ ID NO: 25842 - DNA, 40 bp, Artificial Sequence
  Description of Artificial Sequence: Synthetic primer
tgctgatggattgacgaggagaccaccagatcattaaagg

SEQ ID NO: 25843 - DNA, 40 bp, Artificial Sequence
  Description of Artificial Sequence: Synthetic primer
cctcggatcagagaaaaatgcagacatggtgtcacctgga

SEQ ID NO: 25844 - DNA, 40 bp, Artificial Sequence
  Description of Artificial Sequence: Synthetic primer
tttaagatgcacttttagcacacatttgtatttcccttgg

SEQ ID NO: 25845 - DNA, 40 bp, Artificial Sequence
  Description of Artificial Sequence: Synthetic primer
ctgaaggcactaactgagaaaaacaaagaacttgaaattg

SEQ ID NO: 25846 - DNA, 40 bp, Artificial Sequence
  Description of Artificial Sequence: Synthetic primer
aggaaatacttgacccaagtggatatactgctacaaggtg

SEQ ID NO: 25847 - DNA, 40 bp, Artificial Sequence
  Description of Artificial Sequence: Synthetic primer
cagcacaggtttatgcctctacattgagaacttttaggac

SEQ ID NO: 25848 - DNA, 40 bp, Artificial Sequence
  Description of Artificial Sequence: Synthetic primer
ccagtctctctgacaccggctgcttcaagatttgctgtcc

SEQ ID NO: 25849 - DNA, 40 bp, Artificial Sequence
  Description of Artificial Sequence: Synthetic primer
tgtacaaggccggcccctcagcccagggtgggcacctaga

SEQ ID NO: 25850 - DNA, 40 bp, Artificial Sequence
  Description of Artificial Sequence: Synthetic primer
gtcctgtgcctaccaggtggcccggggcatggagtacttg

SEQ ID NO: 25851 - DNA, 40 bp, Artificial Sequence
  Description of Artificial Sequence: Synthetic primer
tgaccactctccagcaccagcttccagttagtggatatag

SEQ ID NO: 25852 - DNA, 40 bp, Artificial Sequence
  Description of Artificial Sequence: Synthetic primer
tcctctgccagttcctccttctcgaggtccgcttgtttgc

SEQ ID NO: 25853 - DNA, 40 bp, Artificial Sequence
  Description of Artificial Sequence: Synthetic primer
aagacaaagagcctgatgtactgttcgtgggagactccat

SEQ ID NO: 25854 - DNA, 40 bp, Artificial Sequence
  Description of Artificial Sequence: Synthetic primer
ttgcttcatacgtacagctatcaatctgctggtcgcaatc

SEQ ID NO: 25855 - DNA, 40 bp, Artificial Sequence
  Description of Artificial Sequence: Synthetic primer
aatgctttttattattccgttttcgtaggacctttttctc

SEQ ID NO: 25856 - DNA, 40 bp, Artificial Sequence
  Description of Artificial Sequence: Synthetic primer
aagaatatttataggcaatacagtcaaagtttcaaaatag

SEQ ID NO: 25857 - DNA, 40 bp, Artificial Sequence
  Description of Artificial Sequence: Synthetic primer
agagcaagcacagctttaagtaatgagcagcaagccagac

SEQ ID NO: 25858 - DNA, 40 bp, Artificial Sequence
  Description of Artificial Sequence: Synthetic primer
tgggagtagatgctgtggccccgtctcccttggcttttac

SEQ ID NO: 25859 - DNA, 40 bp, Artificial Sequence
  Description of Artificial Sequence: Synthetic primer
ggaatacggcttccttccttttaacttgaaggccaatttc

SEQ ID NO: 25860 - DNA, 40 bp, Artificial Sequence
  Description of Artificial Sequence: Synthetic primer
gatttgctgatggtgctgtctccacggttggatcacactc

SEQ ID NO: 25861 - DNA, 40 bp, Artificial Sequence
  Description of Artificial Sequence: Synthetic primer
agggacgctggtgccgtctggctgggtacgaggcagcttg

SEQ ID NO: 25862 - DNA, 40 bp, Artificial Sequence
  Description of Artificial Sequence: Synthetic primer
tgggatctctcatgaccatacattctctaatttctccaaa

SEQ ID NO: 25863 - DNA, 40 bp, Artificial Sequence
  Description of Artificial Sequence: Synthetic primer
cgctgtggcagcagttcctcccacactctgtggtaacagg

SEQ ID NO: 25864 - DNA, 40 bp, Artificial Sequence
  Description of Artificial Sequence: Synthetic primer
gggcggaaccagcctgcacgcgctggctccgggtgacagc

SEQ ID NO: 25865 - DNA, 40 bp, Artificial Sequence
  Description of Artificial Sequence: Synthetic primer
gcggcctcgggagcctgcatgacctgtaaccgccatggat

SEQ ID NO: 25866 - DNA, 40 bp, Artificial Sequence
  Description of Artificial Sequence: Synthetic primer
tgaacgtgcacagaaagctgtagcaagtttatctgttaag

SEQ ID NO: 25867 - DNA, 40 bp, Artificial Sequence
  Description of Artificial Sequence: Synthetic primer
tttcacagtcaggtttttaggttggggaagcaaggcagac

SEQ ID NO: 25868 - DNA, 40 bp, Artificial Sequence
  Description of Artificial Sequence: Synthetic primer
gaggacttggttgatgtttaaagagaagttcccagccaag

SEQ ID NO: 25869 - DNA, 40 bp, Artificial Sequence
  Description of Artificial Sequence: Synthetic primer
gtgactgtttttattgcctacagtaaccactgtcctttgc

SEQ ID NO: 25870 - DNA, 40 bp, Artificial Sequence
  Description of Artificial Sequence: Synthetic primer
ttctcagatgtttggggggaaacatcctcttaaaatgggt

SEQ ID NO: 25871 - DNA, 40 bp, Artificial Sequence
  Description of Artificial Sequence: Synthetic primer
ctcgttcagaccagctcaaaagacaccaaaggagacatac

SEQ ID NO: 25872 - DNA, 40 bp, Artificial Sequence
  Description of Artificial Sequence: Synthetic primer
taagagccctctgcttccagaagcctgagttgggtccttg

SEQ ID NO: 25873 - DNA, 40 bp, Artificial Sequence
  Description of Artificial Sequence: Synthetic primer
attatcaatacgatgactcaagatttgagaggagcaaatg

SEQ ID NO: 25874 - DNA, 40 bp, Artificial Sequence
  Description of Artificial Sequence: Synthetic primer
ttgagtacagcaccttcaacttctggagagctcccattgc

SEQ ID NO: 25875 - DNA, 40 bp, Artificial Sequence
  Description of Artificial Sequence: Synthetic primer
ctttaaaaatctatttttaggtaatgttctaagaattcca

SEQ ID NO: 25876 - DNA, 40 bp, Artificial Sequence
  Description of Artificial Sequence: Synthetic primer
ggctgctcatggccaatgctgaccagcgcgtcatgatgac

SEQ ID NO: 25877 - DNA, 40 bp, Artificial Sequence
  Description of Artificial Sequence: Synthetic primer
tctcttttagcaatctttgggcaggtgttcggttgtaatc

SEQ ID NO: 25878 - DNA, 40 bp, Artificial Sequence
  Description of Artificial Sequence: Synthetic primer
ggcgcctgctggcctcagggcatgtatgaggctggcttcg

SEQ ID NO: 25879 - DNA, 40 bp, Artificial Sequence
  Description of Artificial Sequence: Synthetic primer
gggtctggggattggcagggaagggccttggccttgaacg

SEQ ID NO: 25880 - DNA, 40 bp, Artificial Sequence
  Description of Artificial Sequence: Synthetic primer
tcttcactggaatcacctccaactattaacaaccttttag

SEQ ID NO: 25881 - DNA, 40 bp, Artificial Sequence
  Description of Artificial Sequence: Synthetic primer
tgtattgtttgggaaattgcaaacttaagcttgcaatatt

SEQ ID NO: 25882 - DNA, 40 bp, Artificial Sequence
  Description of Artificial Sequence: Synthetic primer
tggctcgagatatcatgagtgattccaactatgttgtcag

SEQ ID NO: 25883 - DNA, 40 bp, Artificial Sequence
  Description of Artificial Sequence: Synthetic primer
accctccaagatcgcctcctcgcccagctccagcaccaac

SEQ ID NO: 25884 - DNA, 40 bp, Artificial Sequence
  Description of Artificial Sequence: Synthetic primer
ttggaaagaacacaggtacatcaggttcttttctcacaac

SEQ ID NO: 25885 - DNA, 40 bp, Artificial Sequence
  Description of Artificial Sequence: Synthetic primer
aatgaactcagaagagagccctccttagagaggaccaacg

SEQ ID NO: 25886 - DNA, 40 bp, Artificial Sequence
  Description of Artificial Sequence: Synthetic primer
tcatgaagtaatctgttttgtttctccagatcttcacagc

SEQ ID NO: 25887 - DNA, 40 bp, Artificial Sequence
  Description of Artificial Sequence: Synthetic primer
tgattcaaaatggatttaaaatggatcagccattttatgc

SEQ ID NO: 25888 - DNA, 40 bp, Artificial Sequence
  Description of Artificial Sequence: Synthetic primer
tccaggttgcagccttggttggggtcaatccagtactctc

SEQ ID NO: 25889 - DNA, 40 bp, Artificial Sequence
  Description of Artificial Sequence: Synthetic primer
taacttgttatatattttaacataaagcaacttgaaataa

SEQ ID NO: 25890 - DNA, 40 bp, Artificial Sequence
  Description of Artificial Sequence: Synthetic primer
gtcttttacagcaaatagtagtaaaatagatagacaaaag

SEQ ID NO: 25891 - DNA, 40 bp, Artificial Sequence
  Description of Artificial Sequence: Synthetic primer
aaaagctccacagttcatgttgcctctttgcattgtttgc

SEQ ID NO: 25892 - DNA, 40 bp, Artificial Sequence
  Description of Artificial Sequence: Synthetic primer
ttgagaccaaatttgagatgatcaaacttatagatattgc

SEQ ID NO: 25893 - DNA, 40 bp, Artificial Sequence
  Description of Artificial Sequence: Synthetic primer
ctctggacactggggaatctagtctggtggataaagatgg

SEQ ID NO: 25894 - DNA, 40 bp, Artificial Sequence
  Description of Artificial Sequence: Synthetic primer
gctctgcctcgcgattctccggaatcgtacctcttcgtgg

SEQ ID NO: 25895 - DNA, 40 bp, Artificial Sequence
  Description of Artificial Sequence: Synthetic primer
ctacaacacggaagtgctgttgtcacacctcagttacctc

SEQ ID NO: 25896 - DNA, 40 bp, Artificial Sequence
  Description of Artificial Sequence: Synthetic primer
aggccaagaatcttaccaagctgaaaaacaagcatgaatc

SEQ ID NO: 25897 - DNA, 40 bp, Artificial Sequence
  Description of Artificial Sequence: Synthetic primer
taccacctgagtgagattgtggagaatctgctgcctggac

SEQ ID NO: 25898 - DNA, 40 bp, Artificial Sequence
  Description of Artificial Sequence: Synthetic primer
cagcaaccatataataaccagggacagcagcaaaacatgg

SEQ ID NO: 25899 - DNA, 40 bp, Artificial Sequence
  Description of Artificial Sequence: Synthetic primer
cccaacccccatctccggtcagagccccagttcacaaaag

SEQ ID NO: 25900 - DNA, 40 bp, Artificial Sequence
  Description of Artificial Sequence: Synthetic primer
tccgcccccccttccttgccccccacgcgcgccagccggc

SEQ ID NO: 25901 - DNA, 40 bp, Artificial Sequence
  Description of Artificial Sequence: Synthetic primer
atctcaccgaactgtccccaacatcataaaaagatctaaa

SEQ ID NO: 25902 - DNA, 40 bp, Artificial Sequence
  Description of Artificial Sequence: Synthetic primer
ggtacaggactctctccaggccagttcgggtctgacatgc

SEQ ID NO: 25903 - DNA, 40 bp, Artificial Sequence
  Description of Artificial Sequence: Synthetic primer
aatcagtcaagctgttgaagtctcaggagtctctggtagc

SEQ ID NO: 25904 - DNA, 40 bp, Artificial Sequence
  Description of Artificial Sequence: Synthetic primer
tggatcccctcagtgtttctccggggcaaagcagcaaatg

SEQ ID NO: 25905 - DNA, 40 bp, Artificial Sequence
  Description of Artificial Sequence: Synthetic primer
cttttattgccgactgtgtttctggctgaaccgtgatctg

SEQ ID NO: 25906 - DNA, 40 bp, Artificial Sequence
  Description of Artificial Sequence: Synthetic primer
caactgcagttaaacgtcttgatacttttctcctgcaaac

SEQ ID NO: 25907 - DNA, 40 bp, Artificial Sequence
  Description of Artificial Sequence: Synthetic primer
cctccctgaagcagctggaagagagatggttttgagtttc

SEQ ID NO: 25908 - DNA, 40 bp, Artificial Sequence
  Description of Artificial Sequence: Synthetic primer
atctatcccgcattattccatctgagaagcccagccagac

SEQ ID NO: 25909 - DNA, 40 bp, Artificial Sequence
  Description of Artificial Sequence: Synthetic primer
ggctccttgtagccaccataggactgggccaccggctgct

SEQ ID NO: 25910 - DNA, 40 bp, Artificial Sequence
  Description of Artificial Sequence: Synthetic primer
ctcctcaggcagataaaggaggaacaaggcggtgatgtgg

SEQ ID NO: 25911 - DNA, 40 bp, Artificial Sequence
  Description of Artificial Sequence: Synthetic primer
ttgtaatcaaacagtgtttatattcaatgacattttctcg

SEQ ID NO: 25912 - DNA, 40 bp, Artificial Sequence
  Description of Artificial Sequence: Synthetic primer
cattcacaagtctctcctgactgtgggacaacctcttttc

SEQ ID NO: 25913 - DNA, 40 bp, Artificial Sequence
  Description of Artificial Sequence: Synthetic primer
tccccagctcactgttggtgacaggggatgggggcccttg

SEQ ID NO: 25914 - DNA, 40 bp, Artificial Sequence
  Description of Artificial Sequence: Synthetic primer
ccggcagcagcgcaaacgggtctccctagagccccaccag

SEQ ID NO: 25915 - DNA, 40 bp, Artificial Sequence
  Description of Artificial Sequence: Synthetic primer
ttcataaaatataaaacaagggaggggcgaagggaagagg

SEQ ID NO: 25916 - DNA, 40 bp, Artificial Sequence
  Description of Artificial Sequence: Synthetic primer
gccatgctgcaggacggcttcaaactgggcacacagacag

SEQ ID NO: 25917 - DNA, 40 bp, Artificial Sequence
  Description of Artificial Sequence: Synthetic primer
ttatcttcaaagtacaatgcaactgctttccctgcctgag

SEQ ID NO: 25918 - DNA, 40 bp, Artificial Sequence
  Description of Artificial Sequence: Synthetic primer
ggactatgaaacacaggagggggtgataaagctgaaaaag

SEQ ID NO: 25919 - DNA, 40 bp, Artificial Sequence
  Description of Artificial Sequence: Synthetic primer
ctgaagattcagatagtgaagatatggaaaataaaataag

SEQ ID NO: 25920 - DNA, 40 bp, Artificial Sequence
  Description of Artificial Sequence: Synthetic primer
cacatttagagccactcagtaccacttctcaatacctctg

SEQ ID NO: 25921 - DNA, 40 bp, Artificial Sequence
  Description of Artificial Sequence: Synthetic primer
gcctgggggtgggttcagctctggactgtcttctcgactc

SEQ ID NO: 25922 - DNA, 40 bp, Artificial Sequence
  Description of Artificial Sequence: Synthetic primer
gaatcatgacttctcagctggtctcatcattggtggaaag

SEQ ID NO: 25923 - DNA, 40 bp, Artificial Sequence
  Description of Artificial Sequence: Synthetic primer
ctcgattacagcagcttggggaggcccatcaggctgagac

SEQ ID NO: 25924 - DNA, 40 bp, Artificial Sequence
  Description of Artificial Sequence: Synthetic primer
atgtttttaaaacaagtattgtgaattacagaaagtaatg

SEQ ID NO: 25925 - DNA, 40 bp, Artificial Sequence
  Description of Artificial Sequence: Synthetic primer
cacactctctggaaatgcaggtgagcaacgagacatcaac

SEQ ID NO: 25926 - DNA, 40 bp, Artificial Sequence
  Description of Artificial Sequence: Synthetic primer
ggaacccccatgggtgccgttaatcccctcctctcccaag

SEQ ID NO: 25927 - DNA, 40 bp, Artificial Sequence
  Description of Artificial Sequence: Synthetic primer
tggcaggaatgtacggaaaagttcgcaaagctgctagttc

SEQ ID NO: 25928 - DNA, 40 bp, Artificial Sequence
  Description of Artificial Sequence: Synthetic primer
aataattgtttggttaaaagttgtggtttccattctcaac

SEQ ID NO: 25929 - DNA, 40 bp, Artificial Sequence
  Description of Artificial Sequence: Synthetic primer
atcaaaccttcctcatctgccaatgccatttattctctgg

SEQ ID NO: 25930 - DNA, 40 bp, Artificial Sequence
  Description of Artificial Sequence: Synthetic primer
gctgttctcctgtttgatgggggaggcatctgcgatggag

SEQ ID NO: 25931 - DNA, 40 bp, Artificial Sequence
  Description of Artificial Sequence: Synthetic primer
ctgcctcggccaccccacgcgggaacccagcgccgtcctc

SEQ ID NO: 25932 - DNA, 40 bp, Artificial Sequence
  Description of Artificial Sequence: Synthetic primer
gtgcagatggagagacagctacacagagctttggtctgtg

SEQ ID NO: 25933 - DNA, 40 bp, Artificial Sequence
  Description of Artificial Sequence: Synthetic primer
aggtggcttctcccggcgtgaagcctcaggggcggccacc

SEQ ID NO: 25934 - DNA, 40 bp, Artificial Sequence
  Description of Artificial Sequence: Synthetic primer
aataaaaaattgtccactagatttgaaagtagtggccaag

SEQ ID NO: 25935 - DNA, 40 bp, Artificial Sequence
  Description of Artificial Sequence: Synthetic primer
tttgtaaacacacgatctgggggttagatcaagaattcag

SEQ ID NO: 25936 - DNA, 40 bp, Artificial Sequence
  Description of Artificial Sequence: Synthetic primer
ccccagccctccatgtatagtcagtactgttccttaccac

SEQ ID NO: 25937 - DNA, 40 bp, Artificial Sequence
  Description of Artificial Sequence: Synthetic primer
ccgcaagaaccccgcccgcacctgccgtgacctcaagatg

SEQ ID NO: 25938 - DNA, 40 bp, Artificial Sequence
  Description of Artificial Sequence: Synthetic primer
ggaccttcagagcctcggggcccttggggaccagcttcac

SEQ ID NO: 25939 - DNA, 40 bp, Artificial Sequence
  Description of Artificial Sequence: Synthetic primer
cctgcagcatgcgcttttagcttctctcttgactgaggat

SEQ ID NO: 25940 - DNA, 40 bp, Artificial Sequence
  Description of Artificial Sequence: Synthetic primer
attttccactttctcctctgtcactagatatcgtgcgtaa

SEQ ID NO: 25941 - DNA, 40 bp, Artificial Sequence
  Description of Artificial Sequence: Synthetic primer
gtagccaaggaagccctcgtgtcccagatgaggcaggagc

SEQ ID NO: 25942 - DNA, 40 bp, Artificial Sequence
  Description of Artificial Sequence: Synthetic primer
agtccctccagtcagagctacaaatctacgaggcacttta

SEQ ID NO: 25943 - DNA, 40 bp, Artificial Sequence
  Description of Artificial Sequence: Synthetic primer
gggaagaaggagaggaggcggagcgggtcgggagaaagac

SEQ ID NO: 25944 - DNA, 40 bp, Artificial Sequence
  Description of Artificial Sequence: Synthetic primer
tgtatctactgcttatatacaaaacttgaaagcacaccag

SEQ ID NO: 25945 - DNA, 40 bp, Artificial Sequence
  Description of Artificial Sequence: Synthetic primer
ctctcaatttttccgtattctactacgaaattcttaattc

SEQ ID NO: 25946 - DNA, 40 bp, Artificial Sequence
  Description of Artificial Sequence: Synthetic primer
cagaaacaacatcgatttcttcctcatcttcttgttcctc

SEQ ID NO: 25947 - DNA, 40 bp, Artificial Sequence
  Description of Artificial Sequence: Synthetic primer
ttctacctattccacagtttttcccctgcaattatactcc

SEQ ID NO: 25948 - DNA, 40 bp, Artificial Sequence
  Description of Artificial Sequence: Synthetic primer
accaggacgtagccggcaaaacactcggtacagatactgg

SEQ ID NO: 25949 - DNA, 40 bp, Artificial Sequence
  Description of Artificial Sequence: Synthetic primer
acttgagtctgaagttggccattggaggcatattgctcag

SEQ ID NO: 25950 - DNA, 40 bp, Artificial Sequence
  Description of Artificial Sequence: Synthetic primer
tgaaagcttccaagttggctttctctttgtcaaactgttc

SEQ ID NO: 25951 - DNA, 40 bp, Artificial Sequence
  Description of Artificial Sequence: Synthetic primer
gtatctttttattcattgccctcaggaaagttaaggtatc

SEQ ID NO: 25952 - DNA, 40 bp, Artificial Sequence
  Description of Artificial Sequence: Synthetic primer
ggagccacttcgccaagctgtgaaatgccagggccatcag

SEQ ID NO: 25953 - DNA, 40 bp, Artificial Sequence
  Description of Artificial Sequence: Synthetic primer
ggagcagggaagaaggaatcatcgaggcatgggggtccac

SEQ ID NO: 25954 - DNA, 40 bp, Artificial Sequence
  Description of Artificial Sequence: Synthetic primer
tcccagaggagcttccggcagacctgaagcactggaagcc

SEQ ID NO: 25955 - DNA, 40 bp, Artificial Sequence
  Description of Artificial Sequence: Synthetic primer
agaactcgcacgacttgctcttggctggcggctgcggggg

SEQ ID NO: 25956 - DNA, 40 bp, Artificial Sequence
  Description of Artificial Sequence: Synthetic primer
ggcagctggcactctcagcctttgctgcctgctcacttcg

SEQ ID NO: 25957 - DNA, 40 bp, Artificial Sequence
  Description of Artificial Sequence: Synthetic primer
aaaacacaaatttaggtcagcggaacagactgagcaacac

SEQ ID NO: 25958 - DNA, 40 bp, Artificial Sequence
  Description of Artificial Sequence: Synthetic primer
cctgtttctaccctggaaaatgtatttgccctccaggact

SEQ ID NO: 25959 - DNA, 40 bp, Artificial Sequence
  Description of Artificial Sequence: Synthetic primer
gatgtctgacagcttcagaggtggccacatttcttttcct

SEQ ID NO: 25960 - DNA, 40 bp, Artificial Sequence
  Description of Artificial Sequence: Synthetic primer
gaacagaagtcaagattcctaagcctcccatctcccacac

SEQ ID NO: 25961 - DNA, 40 bp, Artificial Sequence
  Description of Artificial Sequence: Synthetic primer
atgtcttcttctctttcctcctatggcaaataaaacactg

SEQ ID NO: 25962 - DNA, 40 bp, Artificial Sequence
  Description of Artificial Sequence: Synthetic primer
ctttgtacagatgctattcttggaatgttgccagtttttc

SEQ ID NO: 25963 - DNA, 40 bp, Artificial Sequence
  Description of Artificial Sequence: Synthetic primer
catacttgtcatacaaaaacaccagttctgcccaaagatg

SEQ ID NO: 25964 - DNA, 40 bp, Artificial Sequence
  Description of Artificial Sequence: Synthetic primer
acgggaggaggaagcgattctggggtttctgtgttgaacg

SEQ ID NO: 25965 - DNA, 40 bp, Artificial Sequence
  Description of Artificial Sequence: Synthetic primer
gttgtcagggcgcaccatgcggtagcctcgctccaggttc

SEQ ID NO: 25966 - DNA, 40 bp, Artificial Sequence
  Description of Artificial Sequence: Synthetic primer
agaaaccgacaaatactccaagtttgatgaaaatgtaagc

SEQ ID NO: 25967 - DNA, 40 bp, Artificial Sequence
  Description of Artificial Sequence: Synthetic primer
attgattgattgcatagggtgaggggtggtggtgatagtg

SEQ ID NO: 25968 - DNA, 40 bp, Artificial Sequence
  Description of Artificial Sequence: Synthetic primer
ttccccaggcattaaccctctgaagtctcccacgatgcac

SEQ ID NO: 25969 - DNA, 40 bp, Artificial Sequence
  Description of Artificial Sequence: Synthetic primer
caatcaaaagaaagacatggaaatagcagaactcaaaaag

SEQ ID NO: 25970 - DNA, 40 bp, Artificial Sequence
  Description of Artificial Sequence: Synthetic primer
gccagctgctgcgccccgcgcgcgtagccatcgaagccgc

SEQ ID NO: 25971 - DNA, 40 bp, Artificial Sequence
  Description of Artificial Sequence: Synthetic primer
catagaaaagaatgtaggcagagtcggtgtcaatttcatc

SEQ ID NO: 25972 - DNA, 40 bp, Artificial Sequence
  Description of Artificial Sequence: Synthetic primer
ccctctcgtgctgctcagtttgtcctctgctcccatgtag

SEQ ID NO: 25973 - DNA, 40 bp, Artificial Sequence
  Description of Artificial Sequence: Synthetic primer
ctttagtgttctgcccacaatactccaccaatgaccttag

SEQ ID NO: 25974 - DNA, 40 bp, Artificial Sequence
  Description of Artificial Sequence: Synthetic primer
tcccaatactgaagtatttgtctccatcacactgggtgta

SEQ ID NO: 25975 - DNA, 40 bp, Artificial Sequence
  Description of Artificial Sequence: Synthetic primer
gaacaccttcttcatctccttttggagccacctgctcaag

SEQ ID NO: 25976 - DNA, 40 bp, Artificial Sequence
  Description of Artificial Sequence: Synthetic primer
cagcctcatcatcgcttacttctttatcacgttccttctc

SEQ ID NO: 25977 - DNA, 40 bp, Artificial Sequence
  Description of Artificial Sequence: Synthetic primer
taaaagaaagtcatgttgtcgtttactatcttcatctcac

SEQ ID NO: 25978 - DNA, 40 bp, Artificial Sequence
  Description of Artificial Sequence: Synthetic primer
gagttagttcctccatcaggttaatctcatagggtttctg

SEQ ID NO: 25979 - DNA, 40 bp, Artificial Sequence
  Description of Artificial Sequence: Synthetic primer
ctagtctccgagatgacctttccagcctctctgtgttatc

SEQ ID NO: 25980 - DNA, 40 bp, Artificial Sequence
  Description of Artificial Sequence: Synthetic primer
tgtaagcacattcaagtcctcctcttcttccagccttttt

SEQ ID NO: 25981 - DNA, 40 bp, Artificial Sequence
  Description of Artificial Sequence: Synthetic primer
attggtgtactgtaatgtgaatctatgctggtgaaaacaa

SEQ ID NO: 25982 - DNA, 40 bp, Artificial Sequence
  Description of Artificial Sequence: Synthetic primer
cttgtaattcccctaaccataagatttactgctgctgtgg

SEQ ID NO: 25983 - DNA, 40 bp, Artificial Sequence
  Description of Artificial Sequence: Synthetic primer
gttgatgccgtccacgcaggtgccaccgttgaagcaggag

SEQ ID NO: 25984 - DNA, 40 bp, Artificial Sequence
  Description of Artificial Sequence: Synthetic primer
gctgtaagtttggtagaagcccaagccccagaagatttag

SEQ ID NO: 25985 - DNA, 40 bp, Artificial Sequence
  Description of Artificial Sequence: Synthetic primer
ggaggttctaacatcacacacttgtacttcctatttgacc

SEQ ID NO: 25986 - DNA, 40 bp, Artificial Sequence
  Description of Artificial Sequence: Synthetic primer
aaaagagacttaattagaaccaatgagagactatctcaag

SEQ ID NO: 25987 - DNA, 40 bp, Artificial Sequence
  Description of Artificial Sequence: Synthetic primer
aattttttgtgaagctattaaatacttgagttaagtcttg

SEQ ID NO: 25988 - DNA, 40 bp, Artificial Sequence
  Description of Artificial Sequence: Synthetic primer
aggcacttcaaactattaaactaaaacacagatcttaatc

SEQ ID NO: 25989 - DNA, 40 bp, Artificial Sequence
  Description of Artificial Sequence: Synthetic primer
ctctaaatgaccaatccagtgagcctacaatagtgacaag

SEQ ID NO: 25990 - DNA, 40 bp, Artificial Sequence
  Description of Artificial Sequence: Synthetic primer
gagcgggaagggctggcgcgagcgaggtgcgagcgaggag

SEQ ID NO: 25991 - DNA, 40 bp, Artificial Sequence
  Description of Artificial Sequence: Synthetic primer
caagacagagtctctcctggctccttctttacctccttta

SEQ ID NO: 25992 - DNA, 40 bp, Artificial Sequence
  Description of Artificial Sequence: Synthetic primer
ctgtccagttccacaaccctccctaactgctccacctctg

SEQ ID NO: 25993 - DNA, 40 bp, Artificial Sequence
  Description of Artificial Sequence: Synthetic primer
caattcagccaatgcaaagccactgccagaaacttgaaac

SEQ ID NO: 25994 - DNA, 40 bp, Artificial Sequence
  Description of Artificial Sequence: Synthetic primer
tgttggtgtgtggggtgggggcaggggtagggcgggagag

SEQ ID NO: 25995 - DNA, 40 bp, Artificial Sequence
  Description of Artificial Sequence: Synthetic primer
aagcaaaaaattccagcagatggagtccacaggatcagag

SEQ ID NO: 25996 - DNA, 40 bp, Artificial Sequence
  Description of Artificial Sequence: Synthetic primer
ttgccatatgttgaatttttaaaaagcacttggagtgagc

SEQ ID NO: 25997 - DNA, 40 bp, Artificial Sequence
  Description of Artificial Sequence: Synthetic primer
accgtggttgggagagtgcatgccaaagaccctgatgctg

SEQ ID NO: 25998 - DNA, 40 bp, Artificial Sequence
  Description of Artificial Sequence: Synthetic primer
cttcattgtttccccgaccacaaaacatacaaacatagag

SEQ ID NO: 25999 - DNA, 40 bp, Artificial Sequence
  Description of Artificial Sequence: Synthetic primer
acccagacatatacacccgcgaggagctggcgcagaggac

SEQ ID NO: 26000 - DNA, 40 bp, Artificial Sequence
  Description of Artificial Sequence: Synthetic primer
cctgtagtgattttcttagctcttctaactcttgctgaag

SEQ ID NO: 26001 - DNA, 40 bp, Artificial Sequence
  Description of Artificial Sequence: Synthetic primer
ttgacatgtagagactgtcagctattggaacacaaagaac

SEQ ID NO: 26002 - DNA, 40 bp, Artificial Sequence
  Description of Artificial Sequence: Synthetic primer
ttggacattatcggcaccattaccttcttcttcacaaagc

SEQ ID NO: 26003 - DNA, 40 bp, Artificial Sequence
  Description of Artificial Sequence: Synthetic primer
atctgagctgcgaggaggggaccccactcagtatcaccag

SEQ ID NO: 26004 - DNA, 40 bp, Artificial Sequence
  Description of Artificial Sequence: Synthetic primer
cggggggattgcagtcgtccacgttgatctcacagtgcac

SEQ ID NO: 26005 - DNA, 40 bp, Artificial Sequence
  Description of Artificial Sequence: Synthetic primer
tgagctgtacaacaccaaaaccaaccaaattcattcatag

SEQ ID NO: 26006 - DNA, 40 bp, Artificial Sequence
  Description of Artificial Sequence: Synthetic primer
ttagatcatacaaaaatctttattgggtccgtgtgttctc

SEQ ID NO: 26007 - DNA, 40 bp, Artificial Sequence
  Description of Artificial Sequence: Synthetic primer
tcgttctcctctaaacaaaacttgtggaagggctcacaac

SEQ ID NO: 26008 - DNA, 40 bp, Artificial Sequence
  Description of Artificial Sequence: Synthetic primer
ttggaactattgggatttgtgacgcttgttgcagtttacc

SEQ ID NO: 26009 - DNA, 40 bp, Artificial Sequence
  Description of Artificial Sequence: Synthetic primer
aaagttcaacttggtgacactctataagattccaaaaagc

SEQ ID NO: 26010 - DNA, 40 bp, Artificial Sequence
  Description of Artificial Sequence: Synthetic primer
attgtgctttaaaaaccagaggctcctgaaagtcgtttac

SEQ ID NO: 26011 - DNA, 40 bp, Artificial Sequence
  Description of Artificial Sequence: Synthetic primer
tgaagtcttactcgtctgaaaggctttggttgactactac

SEQ ID NO: 26012 - DNA, 40 bp, Artificial Sequence
  Description of Artificial Sequence: Synthetic primer
tacagtacacagaaaaaaataaagcccaaatcaaaaaaac

SEQ ID NO: 26013 - DNA, 40 bp, Artificial Sequence
  Description of Artificial Sequence: Synthetic primer
gggaccgcagcagaatcctggggtattagatgggcctcag

SEQ ID NO: 26014 - DNA, 40 bp, Artificial Sequence
  Description of Artificial Sequence: Synthetic primer
ttgtaagtgttagcggttgtgggcttcctatggcatttcc

SEQ ID NO: 26015 - DNA, 40 bp, Artificial Sequence
  Description of Artificial Sequence: Synthetic primer
attacccagagttgtatggtggaaatagataacgaaagtg

SEQ ID NO: 26016 - DNA, 40 bp, Artificial Sequence
  Description of Artificial Sequence: Synthetic primer
aaacagaacagaaaaatatagcatcttcaataaacatttc

SEQ ID NO: 26017 - DNA, 40 bp, Artificial Sequence
  Description of Artificial Sequence: Synthetic primer
cagtcccctgctggcacttctccatgatgacaaggaagtc

SEQ ID NO: 26018 - DNA, 40 bp, Artificial Sequence
  Description of Artificial Sequence: Synthetic primer
gtttttgctaaggaagataaactctgaaccattaaaggac

SEQ ID NO: 26019 - DNA, 40 bp, Artificial Sequence
  Description of Artificial Sequence: Synthetic primer
cagaaccatgctaaccttacagctcagcctgcacagaagc

SEQ ID NO: 26020 - DNA, 40 bp, Artificial Sequence
  Description of Artificial Sequence: Synthetic primer
tatcagttttcaggaagatttcatcatatttagctttttc

SEQ ID NO: 26021 - DNA, 40 bp, Artificial Sequence
  Description of Artificial Sequence: Synthetic primer
tggcttcttgccacgggcctgtgatgaggaccttcactcc

SEQ ID NO: 26022 - DNA, 40 bp, Artificial Sequence
  Description of Artificial Sequence: Synthetic primer
agcaagtgtagataaagtattaggtcagccccaccatgag

SEQ ID NO: 26023 - DNA, 40 bp, Artificial Sequence
  Description of Artificial Sequence: Synthetic primer
ttggacattcttccatttcctgcatggctacttcatattc

SEQ ID NO: 26024 - DNA, 40 bp, Artificial Sequence
  Description of Artificial Sequence: Synthetic primer
taaatcaagtataaaatggaagtataaaagcatagcttgg

SEQ ID NO: 26025 - DNA, 40 bp, Artificial Sequence
  Description of Artificial Sequence: Synthetic primer
ttaataactacattccatgaggcctcttccaaccaaagag

SEQ ID NO: 26026 - DNA, 40 bp, Artificial Sequence
  Description of Artificial Sequence: Synthetic primer
tattgggttttctcatcactctgcgtggctggtggtgctg

SEQ ID NO: 26027 - DNA, 40 bp, Artificial Sequence
  Description of Artificial Sequence: Synthetic primer
atactgccccaagtaacaaaacaatgaaatgtcaggattg

SEQ ID NO: 26028 - DNA, 40 bp, Artificial Sequence
  Description of Artificial Sequence: Synthetic primer
catgcagatcctgtaactgttctcttgctgattctgcttc

SEQ ID NO: 26029 - DNA, 40 bp, Artificial Sequence
  Description of Artificial Sequence: Synthetic primer
cctcctcctggagttccagttttgcatgatgaacgttttg

SEQ ID NO: 26030 - DNA, 40 bp, Artificial Sequence
  Description of Artificial Sequence: Synthetic primer
tgtaatgaaagacgcatctgcgagtgtcctgatgggttcc

SEQ ID NO: 26031 - DNA, 40 bp, Artificial Sequence
  Description of Artificial Sequence: Synthetic primer
gcttcgaggagctggaagcgcaagatggcttcctgcacag

SEQ ID NO: 26032 - DNA, 40 bp, Artificial Sequence
  Description of Artificial Sequence: Synthetic primer
aatgttttaaatcgcctttgtatctccttagctgctcaat

SEQ ID NO: 26033 - DNA, 40 bp, Artificial Sequence
  Description of Artificial Sequence: Synthetic primer
gtcactctgatgacgggcagctgggcctccaggcaggtgt

SEQ ID NO: 26034 - DNA, 40 bp, Artificial Sequence
  Description of Artificial Sequence: Synthetic primer
ttgttgatgtcacagttggtcccactccacccagggtcac

SEQ ID NO: 26035 - DNA, 40 bp, Artificial Sequence
  Description of Artificial Sequence: Synthetic primer
tctttttgcccagggaaattactcggaggcagcaaaggtg

SEQ ID NO: 26036 - DNA, 40 bp, Artificial Sequence
  Description of Artificial Sequence: Synthetic primer
atgaacaaatctccagagtttgacatgttaaaagaactgg

SEQ ID NO: 26037 - DNA, 40 bp, Artificial Sequence
  Description of Artificial Sequence: Synthetic primer
gcgatggccttgatggagtccccggcggcgcccgttgcag

SEQ ID NO: 26038 - DNA, 40 bp, Artificial Sequence
  Description of Artificial Sequence: Synthetic primer
aaacaagattaagtttgaggctaaagaagctaagaataag

SEQ ID NO: 26039 - DNA, 40 bp, Artificial Sequence
  Description of Artificial Sequence: Synthetic primer
ggtctcgctctcccctgctcgctcttctccgctctgaagc

SEQ ID NO: 26040 - DNA, 40 bp, Artificial Sequence
  Description of Artificial Sequence: Synthetic primer
ccaagttctgggagggggacttccacagagacatggaagc

SEQ ID NO: 26041 - DNA, 40 bp, Artificial Sequence
  Description of Artificial Sequence: Synthetic primer
gagagcctgtacctatggatcgatgctcaccaggcaagag

SEQ ID NO: 26042 - DNA, 40 bp, Artificial Sequence
  Description of Artificial Sequence: Synthetic primer
ttgttttcagtcttgatttctgttgtaacaacagttccag

SEQ ID NO: 26043 - DNA, 40 bp, Artificial Sequence
  Description of Artificial Sequence: Synthetic primer
gtgcaggatacttggtatacgagtaaatacttgagactcg

SEQ ID NO: 26044 - DNA, 40 bp, Artificial Sequence
  Description of Artificial Sequence: Synthetic primer
ggaaactctatacacacacagccggaggtcatactgcatc

SEQ ID NO: 26045 - DNA, 40 bp, Artificial Sequence
  Description of Artificial Sequence: Synthetic primer
agtctggaggtaggtctttgcaagtcaattagtccatctc

SEQ ID NO: 26046 - DNA, 40 bp, Artificial Sequence
  Description of Artificial Sequence: Synthetic primer
ggaagggacaagcggaagggcttgcccaaaatggcaaaac

SEQ ID NO: 26047 - DNA, 40 bp, Artificial Sequence
  Description of Artificial Sequence: Synthetic primer
cactcacagcggcagcgatcaagcaggcagcgggctttgc

SEQ ID NO: 26048 - DNA, 40 bp, Artificial Sequence
  Description of Artificial Sequence: Synthetic primer
tagtgatcctggcattagtattacagttttgccaaaggac

SEQ ID NO: 26049 - DNA, 40 bp, Artificial Sequence
  Description of Artificial Sequence: Synthetic primer
tcctgaagtagatggttgagatatgagttcttcgtactgg

SEQ ID NO: 26050 - DNA, 40 bp, Artificial Sequence
  Description of Artificial Sequence: Synthetic primer
cagtagaaatggcttattcaatacttctcctggaccagac

SEQ ID NO: 26051 - DNA, 40 bp, Artificial Sequence
  Description of Artificial Sequence: Synthetic primer
ctcctccagctgcctcttgagctgcttgaccctggcattg

SEQ ID NO: 26052 - DNA, 40 bp, Artificial Sequence
  Description of Artificial Sequence: Synthetic primer
ggagccggtcacctgtaccatctgtagctggctttcatac

SEQ ID NO: 26053 - DNA, 40 bp, Artificial Sequence
  Description of Artificial Sequence: Synthetic primer
gaagacactcatattaagcctatttataatctatatgcaa

SEQ ID NO: 26054 - DNA, 40 bp, Artificial Sequence
  Description of Artificial Sequence: Synthetic primer
accattcctccagaggggttagctggctgtcatttgctac

SEQ ID NO: 26055 - DNA, 40 bp, Artificial Sequence
  Description of Artificial Sequence: Synthetic primer
atgtatgctcatttttcttaaagatacacgttatgaattt

SEQ ID NO: 26056 - DNA, 40 bp, Artificial Sequence
  Description of Artificial Sequence: Synthetic primer
aagcttaaatttagttcatgagcataaatcccagagatcg

SEQ ID NO: 26057 - DNA, 40 bp, Artificial Sequence
  Description of Artificial Sequence: Synthetic primer
aacttgtagtttatttaaaccccatgtcatgaggaggtac

SEQ ID NO: 26058 - DNA, 40 bp, Artificial Sequence
  Description of Artificial Sequence: Synthetic primer
acgactacagctacaatcagttttccacatatggcgatgc

SEQ ID NO: 26059 - DNA, 40 bp, Artificial Sequence
  Description of Artificial Sequence: Synthetic primer
tggaagatctaagtctctgagggttgagaagttcgatcac

SEQ ID NO: 26060 - DNA, 40 bp, Artificial Sequence
  Description of Artificial Sequence: Synthetic primer
acatgcgatgtcttctagccaccttggtgatatcgacagc

SEQ ID NO: 26061 - DNA, 40 bp, Artificial Sequence
  Description of Artificial Sequence: Synthetic primer
cctggttgaagaacagggcgaagtgggcctgttccacggc

SEQ ID NO: 26062 - DNA, 40 bp, Artificial Sequence
  Description of Artificial Sequence: Synthetic primer
agtcagctacattgctgattgtgccttccgggggctttcc

SEQ ID NO: 26063 - DNA, 40 bp, Artificial Sequence
  Description of Artificial Sequence: Synthetic primer
taccgatcctcagactccagtttctggcgcttagtgtacc

SEQ ID NO: 26064 - DNA, 40 bp, Artificial Sequence
  Description of Artificial Sequence: Synthetic primer
cctggttagcaagaccactcccacctcaggaagctagtat

SEQ ID NO: 26065 - DNA, 40 bp, Artificial Sequence
  Description of Artificial Sequence: Synthetic primer
tatggtgcagcagcttcttcagaagaaagtacctgtgaag

SEQ ID NO: 26066 - DNA, 40 bp, Artificial Sequence
  Description of Artificial Sequence: Synthetic primer
aaaaaaacagctctgcaggcttaataaaaatgacagactg

SEQ ID NO: 26067 - DNA, 40 bp, Artificial Sequence
  Description of Artificial Sequence: Synthetic primer
gctgggggggaagagccccaacatcatcatgtcagatgcc

SEQ ID NO: 26068 - DNA, 40 bp, Artificial Sequence
  Description of Artificial Sequence: Synthetic primer
aggagcccacctgcttctcatcaccagccccctggaggta

SEQ ID NO: 26069 - DNA, 40 bp, Artificial Sequence
  Description of Artificial Sequence: Synthetic primer
ccctttccgcactgtccgctttgtgaggctcagaggaagg

SEQ ID NO: 26070 - DNA, 40 bp, Artificial Sequence
  Description of Artificial Sequence: Synthetic primer
ccactgggagggggtacttggctggcctggggcacctcac

SEQ ID NO: 26071 - DNA, 40 bp, Artificial Sequence
  Description of Artificial Sequence: Synthetic primer
atgcagctgccttatgactcaagatgggagtttccaagag

SEQ ID NO: 26072 - DNA, 40 bp, Artificial Sequence
  Description of Artificial Sequence: Synthetic primer
ggagtgtcttgggctgaatgatcttctcaactttgccttg

SEQ ID NO: 26073 - DNA, 40 bp, Artificial Sequence
  Description of Artificial Sequence: Synthetic primer
cacactgctggtggctgaggaggcagcgctgggccccacc

SEQ ID NO: 26074 - DNA, 40 bp, Artificial Sequence
  Description of Artificial Sequence: Synthetic primer
cagtcacattgcgttcccacacacccgtcacgttgatgtc

SEQ ID NO: 26075 - DNA, 40 bp, Artificial Sequence
  Description of Artificial Sequence: Synthetic primer
ttctgagttatcatctgaaaggaggtttttgacttctgag

SEQ ID NO: 26076 - DNA, 40 bp, Artificial Sequence
  Description of Artificial Sequence: Synthetic primer
gtctccaggccgcccccgctgcaggaggcgatcatgagcg

SEQ ID NO: 26077 - DNA, 40 bp, Artificial Sequence
  Description of Artificial Sequence: Synthetic primer
taaatgcgttttatgtttaaataaagaggaaaattttttg

SEQ ID NO: 26078 - DNA, 40 bp, Artificial Sequence
  Description of Artificial Sequence: Synthetic primer
ccacgaagaggtacgattccggagaatcgcgaggcagagc

SEQ ID NO: 26079 - DNA, 40 bp, Artificial Sequence
  Description of Artificial Sequence: Synthetic primer
agttgcccccaattggaacctgccacttggcattagaggg

SEQ ID NO: 26080 - DNA, 40 bp, Artificial Sequence
  Description of Artificial Sequence: Synthetic primer
ctctgtagcagggacggtttctgtggcttcgccgggcatt

SEQ ID NO: 26081 - DNA, 40 bp, Artificial Sequence
  Description of Artificial Sequence: Synthetic primer
agacagttggaggaatctgtcgatgccctcagtgaagaac

SEQ ID NO: 26082 - DNA, 40 bp, Artificial Sequence
  Description of Artificial Sequence: Synthetic primer
cagacaccatcagatgccagagaaacacttgggccttttc

SEQ ID NO: 26083 - DNA, 40 bp, Artificial Sequence
  Description of Artificial Sequence: Synthetic primer
aatggcttttaaagcaacttttgttaatgctactgatcct

SEQ ID NO: 26084 - DNA, 40 bp, Artificial Sequence
  Description of Artificial Sequence: Synthetic primer
tctgcgaccatcaggtgatggtgtaaaaaacttagtaagg

SEQ ID NO: 26085 - DNA, 40 bp, Artificial Sequence
  Description of Artificial Sequence: Synthetic primer
tcaagagtgcagccaggaccaggactggccaggccctttc

SEQ ID NO: 26086 - DNA, 40 bp, Artificial Sequence
  Description of Artificial Sequence: Synthetic primer
gaaacattgtgtaaatcttaaaattttttaaaaacaattc

SEQ ID NO: 26087 - DNA, 40 bp, Artificial Sequence
  Description of Artificial Sequence: Synthetic primer
gccacaaacttagttaataatcatggttaagggacattgc

SEQ ID NO: 26088 - DNA, 40 bp, Artificial Sequence
  Description of Artificial Sequence: Synthetic primer
gaaattttgatagggacagtaaacctatgagcctctatta

SEQ ID NO: 26089 - DNA, 40 bp, Artificial Sequence
  Description of Artificial Sequence: Synthetic primer
ttaagtccaaacctttatctgtctgttattcttaatgttg

SEQ ID NO: 26090 - DNA, 40 bp, Artificial Sequence
  Description of Artificial Sequence: Synthetic primer
ataaaataagattgctggaagagcaactacaacatgaaat

SEQ ID NO: 26091 - DNA, 40 bp, Artificial Sequence
  Description of Artificial Sequence: Synthetic primer
tttgggcataaaagaacttttttatgcttaccatcttttt

SEQ ID NO: 26092 - DNA, 40 bp, Artificial Sequence
  Description of Artificial Sequence: Synthetic primer
ggacgaactgcctaatcgtttggttctgaggcctggtttg

SEQ ID NO: 26093 - DNA, 40 bp, Artificial Sequence
  Description of Artificial Sequence: Synthetic primer
tcctccactcagagatggggggaaggaggaatttcattcc

SEQ ID NO: 26094 - DNA, 40 bp, Artificial Sequence
  Description of Artificial Sequence: Synthetic primer
tgtaacaacgctgaataacagcagcagctacttcttgctg

SEQ ID NO: 26095 - DNA, 40 bp, Artificial Sequence
  Description of Artificial Sequence: Synthetic primer
cagggcctctgagagctggcacactgcccggcacaaagta

SEQ ID NO: 26096 - DNA, 40 bp, Artificial Sequence
  Description of Artificial Sequence: Synthetic primer
gactcccacagactattttctggggagggcatggaatgta

SEQ ID NO: 26097 - DNA, 40 bp, Artificial Sequence
  Description of Artificial Sequence: Synthetic primer
agccagccacagggcccccaggaagcattgcaggaggaag

SEQ ID NO: 26098 - DNA, 40 bp, Artificial Sequence
  Description of Artificial Sequence: Synthetic primer
ctccgtgctcaatgagaccagcttcatcttcactgagttc

SEQ ID NO: 26099 - DNA, 40 bp, Artificial Sequence
  Description of Artificial Sequence: Synthetic primer
aaggtccctatcacgatctctgtatagtaagggtggtgtc

SEQ ID NO: 26100 - DNA, 40 bp, Artificial Sequence
  Description of Artificial Sequence: Synthetic primer
tatccatctgtaccattaccttccaccattcagaatcacg

SEQ ID NO: 26101 - DNA, 40 bp, Artificial Sequence
  Description of Artificial Sequence: Synthetic primer
tatcaaatggaacacgatcatctgtccttgtttgtcattg

SEQ ID NO: 26102 - DNA, 40 bp, Artificial Sequence
  Description of Artificial Sequence: Synthetic primer
tggaggcggtggcgggatcggaggcttagggccgctctgg

SEQ ID NO: 26103 - DNA, 40 bp, Artificial Sequence
  Description of Artificial Sequence: Synthetic primer
cctctgtagtattttttaaataaatcagtgtttacattag

SEQ ID NO: 26104 - DNA, 40 bp, Artificial Sequence
  Description of Artificial Sequence: Synthetic primer
ctcgggtatgaaccgcctgacccaagtgaagacacctgta

SEQ ID NO: 26105 - DNA, 40 bp, Artificial Sequence
  Description of Artificial Sequence: Synthetic primer
cctcaaacccccaaagtgcctaagagtgaagacgaagatg

SEQ ID NO: 26106 - DNA, 40 bp, Artificial Sequence
  Description of Artificial Sequence: Synthetic primer
aaagggtacactcatatttgtgcactttactgaaatagat

SEQ ID NO: 26107 - DNA, 40 bp, Artificial Sequence
  Description of Artificial Sequence: Synthetic primer
tgatgtgcccaaaggagactggaggtgtcctaaatgtgtc

SEQ ID NO: 26108 - DNA, 40 bp, Artificial Sequence
  Description of Artificial Sequence: Synthetic primer
aaacccccaagcacttcttctctgtacaacattggtgaat

SEQ ID NO: 26109 - DNA, 40 bp, Artificial Sequence
  Description of Artificial Sequence: Synthetic primer
taggttctaaatattgctttctcagtgctgaatggtctcc

SEQ ID NO: 26110 - DNA, 40 bp, Artificial Sequence
  Description of Artificial Sequence: Synthetic primer
ttttttccctcacagttaatctcctccttgataaagcaat

SEQ ID NO: 26111 - DNA, 40 bp, Artificial Sequence
  Description of Artificial Sequence: Synthetic primer
cagggacaaccaaagtgacgatcacactgaccgatgtcaa

SEQ ID NO: 26112 - DNA, 40 bp, Artificial Sequence
  Description of Artificial Sequence: Synthetic primer
atttgagtgggaataatatccttcagttgaagacgacgac

SEQ ID NO: 26113 - DNA, 40 bp, Artificial Sequence
  Description of Artificial Sequence: Synthetic primer
gtcctggctaaagttaacaatggatcccagaaaataaaag

SEQ ID NO: 26114 - DNA, 40 bp, Artificial Sequence
  Description of Artificial Sequence: Synthetic primer
aacatagtaattattaggattgtatcaagtgtatctaaag

SEQ ID NO: 26115 - DNA, 40 bp, Artificial Sequence
  Description of Artificial Sequence: Synthetic primer
ggggagacttatagtccccaggggagggcgcccgggcccg

SEQ ID NO: 26116 - DNA, 40 bp, Artificial Sequence
  Description of Artificial Sequence: Synthetic primer
atcagatctcataatgtacagatttctctatttacagtcc

SEQ ID NO: 26117 - DNA, 40 bp, Artificial Sequence
  Description of Artificial Sequence: Synthetic primer
gcaaagaagaaaagactcctggctgtgtgaaaattaaaaa

SEQ ID NO: 26118 - DNA, 40 bp, Artificial Sequence
  Description of Artificial Sequence: Synthetic primer
gaaaacaagcctggttcagttaaacctactcaaactattg

SEQ ID NO: 26119 - DNA, 40 bp, Artificial Sequence
  Description of Artificial Sequence: Synthetic primer
cagctcgtgcttgttgaggacctccttcacgtagtaccag

SEQ ID NO: 26120 - DNA, 40 bp, Artificial Sequence
  Description of Artificial Sequence: Synthetic primer
agaagagaatgagcttgaaggcaggcacatttacatctat

SEQ ID NO: 26121 - DNA, 40 bp, Artificial Sequence
  Description of Artificial Sequence: Synthetic primer
agaggatttgatttctgcccagggatttgctcaccccaag

SEQ ID NO: 26122 - DNA, 40 bp, Artificial Sequence
  Description of Artificial Sequence: Synthetic primer
tccaatgaaagctctgtcttccccacaatcaattttacag

SEQ ID NO: 26123 - DNA, 40 bp, Artificial Sequence
  Description of Artificial Sequence: Synthetic primer
gatacggcagaagacggacttctcctgggtaaagtccctg

SEQ ID NO: 26124 - DNA, 40 bp, Artificial Sequence
  Description of Artificial Sequence: Synthetic primer
gtagtgggccccactgatgtgggcaagtctacagtgtgtc

SEQ ID NO: 26125 - DNA, 40 bp, Artificial Sequence
  Description of Artificial Sequence: Synthetic primer
tgagtgccaatttcttactagtactatttcttaatgtaac

SEQ ID NO: 26126 - DNA, 40 bp, Artificial Sequence
  Description of Artificial Sequence: Synthetic primer
tacagcgtcagccttgtggttgggcaacacggagtagatg

SEQ ID NO: 26127 - DNA, 40 bp, Artificial Sequence
  Description of Artificial Sequence: Synthetic primer
tacagtagtcattgaaagttatgtttctttgcttacttca

SEQ ID NO: 26128 - DNA, 40 bp, Artificial Sequence
  Description of Artificial Sequence: Synthetic primer
tattgttgtacatgcagatgaattagaagaacttatcaac

SEQ ID NO: 26129 - DNA, 40 bp, Artificial Sequence
  Description of Artificial Sequence: Synthetic primer
ctgttccctagcttcttgggtgtgttgaggatgctgaagg

SEQ ID NO: 26130 - DNA, 40 bp, Artificial Sequence
  Description of Artificial Sequence: Synthetic primer
tgcagggggtgctgaggcacgggttggggtcctggcatcg

SEQ ID NO: 26131 - DNA, 40 bp, Artificial Sequence
  Description of Artificial Sequence: Synthetic primer
aaaggaaatttttaatgtcgtaaacaagtttagtaaacac

SEQ ID NO: 26132 - DNA, 40 bp, Artificial Sequence
  Description of Artificial Sequence: Synthetic primer
atgtttttaagccattcatttgttcttccagtctagaaac

SEQ ID NO: 26133 - DNA, 40 bp, Artificial Sequence
  Description of Artificial Sequence: Synthetic primer
agaaagcccacgggatcctagcacggcgcccatcttacag

SEQ ID NO: 26134 - DNA, 40 bp, Artificial Sequence
  Description of Artificial Sequence: Synthetic primer
tccatttttctttctataacctttgccagagttaaaatac

SEQ ID NO: 26135 - DNA, 40 bp, Artificial Sequence
  Description of Artificial Sequence: Synthetic primer
aaacagtattaatgaacaccagccctcatgtgtgtaaaac

SEQ ID NO: 26136 - DNA, 40 bp, Artificial Sequence
  Description of Artificial Sequence: Synthetic primer
aggctcttcctgggcccttagatctgcagttccgacaagc

SEQ ID NO: 26137 - DNA, 40 bp, Artificial Sequence
  Description of Artificial Sequence: Synthetic primer
gccgttgttgacgtgggtgggctggttgaggcgcagacac

SEQ ID NO: 26138 - DNA, 40 bp, Artificial Sequence
  Description of Artificial Sequence: Synthetic primer
caacgccgtggctcacggcctcaacggtggctccccggcc

SEQ ID NO: 26139 - DNA, 40 bp, Artificial Sequence
  Description of Artificial Sequence: Synthetic primer
tgacaatgacctacatataaggcacctgtacagactccaa

SEQ ID NO: 26140 - DNA, 40 bp, Artificial Sequence
  Description of Artificial Sequence: Synthetic primer
tagcactcaaaacagcaccaacgtgcaaatggtagacagc

SEQ ID NO: 26141 - DNA, 40 bp, Artificial Sequence
  Description of Artificial Sequence: Synthetic primer
tggatgccagcaaagagaatggggctgggcagatctgtga

SEQ ID NO: 26142 - DNA, 40 bp, Artificial Sequence
  Description of Artificial Sequence: Synthetic primer
tgccttcttccattactcagagatgttgagacgttttcag

SEQ ID NO: 26143 - DNA, 40 bp, Artificial Sequence
  Description of Artificial Sequence: Synthetic primer
tcctgtcctgagcattactatctcttctgagttttctgtg

SEQ ID NO: 26144 - DNA, 40 bp, Artificial Sequence
  Description of Artificial Sequence: Synthetic primer
ggtcagtattgatgaggctgatcatttggctctttttttc

SEQ ID NO: 26145 - DNA, 40 bp, Artificial Sequence
  Description of Artificial Sequence: Synthetic primer
cctgtcaatatccattccatgaattttacctggcaagctg

SEQ ID NO: 26146 - DNA, 40 bp, Artificial Sequence
  Description of Artificial Sequence: Synthetic primer
gaggcccgccgcctccgcccgcggcagtcccgggcccggg

SEQ ID NO: 26147 - DNA, 40 bp, Artificial Sequence
  Description of Artificial Sequence: Synthetic primer
cataccagcagtagttttccgtcaaatccatcaacaccag

SEQ ID NO: 26148 - DNA, 40 bp, Artificial Sequence
  Description of Artificial Sequence: Synthetic primer
gagtggctaagcgctctccaccatggtcaaatctgaatac

SEQ ID NO: 26149 - DNA, 40 bp, Artificial Sequence
  Description of Artificial Sequence: Synthetic primer
taagacaaatgatcttcagtgttaaagagaaaagcaaaac

SEQ ID NO: 26150 - DNA, 40 bp, Artificial Sequence
  Description of Artificial Sequence: Synthetic primer
tccttcatcagatatacagatcgtacataggagacgaaac

SEQ ID NO: 26151 - DNA, 40 bp, Artificial Sequence
  Description of Artificial Sequence: Synthetic primer
tcaggctggctcctatttgtctagcaagctgggccccagg

SEQ ID NO: 26152 - DNA, 40 bp, Artificial Sequence
  Description of Artificial Sequence: Synthetic primer
caaaatatctcttgctccatatcactctactatcattgtc

SEQ ID NO: 26153 - DNA, 40 bp, Artificial Sequence
  Description of Artificial Sequence: Synthetic primer
tggttgtagcctctcgtttcccaaaaacagagaaggaaat

SEQ ID NO: 26154 - DNA, 40 bp, Artificial Sequence
  Description of Artificial Sequence: Synthetic primer
ttcctgtctctgggtctttaagcacagctccctgaattgc

SEQ ID NO: 26155 - DNA, 40 bp, Artificial Sequence
  Description of Artificial Sequence: Synthetic primer
aatatattttcagtgcagaatttataactgctgacagctc

SEQ ID NO: 26156 - DNA, 40 bp, Artificial Sequence
  Description of Artificial Sequence: Synthetic primer
tgggtttggaaagagcatgcctctggaaacacagcttcct

SEQ ID NO: 26157 - DNA, 40 bp, Artificial Sequence
  Description of Artificial Sequence: Synthetic primer
gcagctatgggggccaccgctggcagctgggcaggcctgc

SEQ ID NO: 26158 - DNA, 40 bp, Artificial Sequence
  Description of Artificial Sequence: Synthetic primer
ttcttaaaatggaaaaacctgtgggctcttcatatacctc

SEQ ID NO: 26159 - DNA, 40 bp, Artificial Sequence
  Description of Artificial Sequence: Synthetic primer
aggtgaagggtcacacattattaaaaagaaatccaaaagg

SEQ ID NO: 26160 - DNA, 40 bp, Artificial Sequence
  Description of Artificial Sequence: Synthetic primer
gccccagtgaaggagtgagggacttcagccgggaactctc

SEQ ID NO: 26161 - DNA, 40 bp, Artificial Sequence
  Description of Artificial Sequence: Synthetic primer
ggtttcgctgggtcaccaggactctttctggagatacgac

SEQ ID NO: 26162 - DNA, 40 bp, Artificial Sequence
  Description of Artificial Sequence: Synthetic primer
tccaccagcaaccatgagtggttccatgatgggaagtgac

SEQ ID NO: 26163 - DNA, 40 bp, Artificial Sequence
  Description of Artificial Sequence: Synthetic primer
ctatgtgccgcctctgctgctggaagtgggggtagaggag

SEQ ID NO: 26164 - DNA, 40 bp, Artificial Sequence
  Description of Artificial Sequence: Synthetic primer
aaagaagctgagacctgtgcttctgtggctcagctgcttc

SEQ ID NO: 26165 - DNA, 40 bp, Artificial Sequence
  Description of Artificial Sequence: Synthetic primer
acaagatctccagaccttacaagatggccgccacccagac

SEQ ID NO: 26166 - DNA, 40 bp, Artificial Sequence
  Description of Artificial Sequence: Synthetic primer
ggcatctgccggctgctccgcaccccggggtcccaggaag

SEQ ID NO: 26167 - DNA, 40 bp, Artificial Sequence
  Description of Artificial Sequence: Synthetic primer
ttcaactggatttctagatagaagctggattcatgtgatg

SEQ ID NO: 26168 - DNA, 40 bp, Artificial Sequence
  Description of Artificial Sequence: Synthetic primer
gctttgttgaaagagggggttagagagagcaagacagcac

SEQ ID NO: 26169 - DNA, 40 bp, Artificial Sequence
  Description of Artificial Sequence: Synthetic primer
gggaggccactccagattgaatagaggccatgggagtcac

SEQ ID NO: 26170 - DNA, 40 bp, Artificial Sequence
  Description of Artificial Sequence: Synthetic primer
ttttactgcaacattttcaaggaaaagaaaagggtatttt

SEQ ID NO: 26171 - DNA, 40 bp, Artificial Sequence
  Description of Artificial Sequence: Synthetic primer
catgtggctgtaccttctccacataaatgggatggataat

SEQ ID NO: 26172 - DNA, 40 bp, Artificial Sequence
  Description of Artificial Sequence: Synthetic primer
gaagattggcatattagctttaaaaatttttaaagattgg

SEQ ID NO: 26173 - DNA, 40 bp, Artificial Sequence
  Description of Artificial Sequence: Synthetic primer
tgtgaaatgaattggcatctttaggactaagtgtgctctg

SEQ ID NO: 26174 - DNA, 40 bp, Artificial Sequence
  Description of Artificial Sequence: Synthetic primer
aaactttatagtttactcaagcatcttaaactctgccata

SEQ ID NO: 26175 - DNA, 40 bp, Artificial Sequence
  Description of Artificial Sequence: Synthetic primer
atgtaaaaatttaggtatgtctgggagaaactgaaaccac

SEQ ID NO: 26176 - DNA, 40 bp, Artificial Sequence
  Description of Artificial Sequence: Synthetic primer
ttcggaggtctgggagaaagcagtgatgggggtggtggtg

SEQ ID NO: 26177 - DNA, 40 bp, Artificial Sequence
  Description of Artificial Sequence: Synthetic primer
gaaggcctggttggtgtggtcagtccaggcaatgcttctg

SEQ ID NO: 26178 - DNA, 40 bp, Artificial Sequence
  Description of Artificial Sequence: Synthetic primer
tctttttttcttggcccccttcccaaggccttaagctttg

SEQ ID NO: 26179 - DNA, 40 bp, Artificial Sequence
  Description of Artificial Sequence: Synthetic primer
atcttcaacaccagagtcgtgatcatgtattggcatcttc

SEQ ID NO: 26180 - DNA, 40 bp, Artificial Sequence
  Description of Artificial Sequence: Synthetic primer
aaaggcctccttcctccagtgcctgctgaaccatcttagg

SEQ ID NO: 26181 - DNA, 40 bp, Artificial Sequence
  Description of Artificial Sequence: Synthetic primer
aatgctcaaagccgaaatggaagacctggtcagctccaag

SEQ ID NO: 26182 - DNA, 40 bp, Artificial Sequence
  Description of Artificial Sequence: Synthetic primer
cagacctgatccacgtggcaggaaaaagaggaacctgaac

SEQ ID NO: 26183 - DNA, 40 bp, Artificial Sequence
  Description of Artificial Sequence: Synthetic primer
ggtcccacttgtacagcacgacggcagcttccaagtgccc

SEQ ID NO: 26184 - DNA, 40 bp, Artificial Sequence
  Description of Artificial Sequence: Synthetic primer
agaaaaattacctgttgcaggtaagatctgcaaagtgtgg

SEQ ID NO: 26185 - DNA, 40 bp, Artificial Sequence
  Description of Artificial Sequence: Synthetic primer
cgtggtaaccgccgtagtccgggtactgcggggggctgac

SEQ ID NO: 26186 - DNA, 40 bp, Artificial Sequence
  Description of Artificial Sequence: Synthetic primer
acagagcaaagcccaaaagccaacctcagatctcctgatt

SEQ ID NO: 26187 - DNA, 40 bp, Artificial Sequence
  Description of Artificial Sequence: Synthetic primer
tgggacccccacggagaccaagccgtcatgacaacagtgc

SEQ ID NO: 26188 - DNA, 40 bp, Artificial Sequence
  Description of Artificial Sequence: Synthetic primer
ctctttttctctaaccagaagcttggaagaacacaaggaa

SEQ ID NO: 26189 - DNA, 40 bp, Artificial Sequence
  Description of Artificial Sequence: Synthetic primer
tttgttttttgctctgttttgaaacccctgagacactatc

SEQ ID NO: 26190 - DNA, 40 bp, Artificial Sequence
  Description of Artificial Sequence: Synthetic primer
atgaggcagaaacacgcacaggcggtggaggagctcacag

SEQ ID NO: 26191 - DNA, 40 bp, Artificial Sequence
  Description of Artificial Sequence: Synthetic primer
gagtgaagacgaggggaaaacagagacaaccaacatcaac

SEQ ID NO: 26192 - DNA, 40 bp, Artificial Sequence
  Description of Artificial Sequence: Synthetic primer
ttgtgccctcttttggggcagcctgttgaaactgaagcac

SEQ ID NO: 26193 - DNA, 40 bp, Artificial Sequence
  Description of Artificial Sequence: Synthetic primer
tcccaacctgtcatgaaagttgcagtgaagatgctaaaac

SEQ ID NO: 26194 - DNA, 40 bp, Artificial Sequence
  Description of Artificial Sequence: Synthetic primer
ttgctgagtgaaggaaaggagaaattgttgctattgtcag

SEQ ID NO: 26195 - DNA, 40 bp, Artificial Sequence
  Description of Artificial Sequence: Synthetic primer
atgttctactcttagacgttcctgctctaacatcattttc

SEQ ID NO: 26196 - DNA, 40 bp, Artificial Sequence
  Description of Artificial Sequence: Synthetic primer
aagagactgagttcttgcacttgggtgaagaggccagact

SEQ ID NO: 26197 - DNA, 40 bp, Artificial Sequence
  Description of Artificial Sequence: Synthetic primer
gggcctggtccggctttgctctcgcaggagattcatcacg

SEQ ID NO: 26198 - DNA, 40 bp, Artificial Sequence
  Description of Artificial Sequence: Synthetic primer
cttaaagacatcatttttctatgtttttaatgactattgc

SEQ ID NO: 26199 - DNA, 40 bp, Artificial Sequence
  Description of Artificial Sequence: Synthetic primer
cccgggcagtagaggaactacacaaacttttgaaagaagc

SEQ ID NO: 26200 - DNA, 40 bp, Artificial Sequence
  Description of Artificial Sequence: Synthetic primer
taaggctgagcactggaaccgctgccacaagctcatcatc

SEQ ID NO: 26201 - DNA, 40 bp, Artificial Sequence
  Description of Artificial Sequence: Synthetic primer
ggccatctgctcggagttcctagagatggcgaggcacagc

SEQ ID NO: 26202 - DNA, 40 bp, Artificial Sequence
  Description of Artificial Sequence: Synthetic primer
aacctcagagcccccatttgttcattaaagaggcaactac

SEQ ID NO: 26203 - DNA, 40 bp, Artificial Sequence
  Description of Artificial Sequence: Synthetic primer
agatacacaaactctgaagaagcagaaatggagagaatgc

SEQ ID NO: 26204 - DNA, 40 bp, Artificial Sequence
  Description of Artificial Sequence: Synthetic primer
ttcgtcagcgtgatatgtaccgtattttattgtcacaaac

SEQ ID NO: 26205 - DNA, 40 bp, Artificial Sequence
  Description of Artificial Sequence: Synthetic primer
aagtaaagccactactcctgcctttttgcttagtggacag

SEQ ID NO: 26206 - DNA, 40 bp, Artificial Sequence
  Description of Artificial Sequence: Synthetic primer
tgtgtgtgaatgtttgaaactatggtgctgtgtcctcttc

SEQ ID NO: 26207 - DNA, 40 bp, Artificial Sequence
  Description of Artificial Sequence: Synthetic primer
gcatgagtggaaagtcctatttggcactccttgacctcag

SEQ ID NO: 26208 - DNA, 40 bp, Artificial Sequence
  Description of Artificial Sequence: Synthetic primer
gcgacgcacgttccggggcactcagcgctgctgcgcgccc

SEQ ID NO: 26209 - DNA, 40 bp, Artificial Sequence
  Description of Artificial Sequence: Synthetic primer
tgtagtcaaagacagtatgggctggcagtttgtgtaattg

SEQ ID NO: 26210 - DNA, 40 bp, Artificial Sequence
  Description of Artificial Sequence: Synthetic primer
ctgttgtggctgcatttcctggtggccagtgacaactgtg

SEQ ID NO: 26211 - DNA, 40 bp, Artificial Sequence
  Description of Artificial Sequence: Synthetic primer
agggcgacagaggcataaagggtcaccgtggcttctctgg

SEQ ID NO: 26212 - DNA, 40 bp, Artificial Sequence
  Description of Artificial Sequence: Synthetic primer
ccgtcaagatcgggggtacagagggtgccaggcagatgag

SEQ ID NO: 26213 - DNA, 40 bp, Artificial Sequence
  Description of Artificial Sequence: Synthetic primer
gactacatctcatcatctcacgaatctgctgtaatataag

SEQ ID NO: 26214 - DNA, 40 bp, Artificial Sequence
  Description of Artificial Sequence: Synthetic primer
ctgcatctccgacttggagtagaatgtcagtgagcacatc

SEQ ID NO: 26215 - DNA, 40 bp, Artificial Sequence
  Description of Artificial Sequence: Synthetic primer
ttgaatgataccagtggttccccaaaaatgtttgctcagg

SEQ ID NO: 26216 - DNA, 40 bp, Artificial Sequence
  Description of Artificial Sequence: Synthetic primer
cccacctggtgcccgtggtcaggctggtgtgatgggattc

SEQ ID NO: 26217 - DNA, 40 bp, Artificial Sequence
  Description of Artificial Sequence: Synthetic primer
aaaatacaacaaccgtgatcacatgctaaggccagctatc

SEQ ID NO: 26218 - DNA, 40 bp, Artificial Sequence
  Description of Artificial Sequence: Synthetic primer
tgttgcccaaggcttcagctctctgcctgcaagtccacac

SEQ ID NO: 26219 - DNA, 40 bp, Artificial Sequence
  Description of Artificial Sequence: Synthetic primer
tctgtaagaaaagaaaatgtgaggagctgaaaaagaaacc

SEQ ID NO: 26220 - DNA, 40 bp, Artificial Sequence
  Description of Artificial Sequence: Synthetic primer
tggaaaaacagaagtacaaaagcaacagccccagatctaa

SEQ ID NO: 26221 - DNA, 40 bp, Artificial Sequence
  Description of Artificial Sequence: Synthetic primer
ggcacagatcctgcaaatctccttcatcttccctcctagc

SEQ ID NO: 26222 - DNA, 40 bp, Artificial Sequence
  Description of Artificial Sequence: Synthetic primer
gatgacaaaagaaaatctgctctgtggaaagaaagaactg

SEQ ID NO: 26223 - DNA, 40 bp, Artificial Sequence
  Description of Artificial Sequence: Synthetic primer
ctgcccgggttagttcattgctctttgcttctgagtcatc

SEQ ID NO: 26224 - DNA, 40 bp, Artificial Sequence
  Description of Artificial Sequence: Synthetic primer
ccactgcctgccagcccccccaacagcccctcagccatgg

SEQ ID NO: 26225 - DNA, 40 bp, Artificial Sequence
  Description of Artificial Sequence: Synthetic primer
ctcagctcgattcaggattcccccctgcttctgggttagg

SEQ ID NO: 26226 - DNA, 40 bp, Artificial Sequence
  Description of Artificial Sequence: Synthetic primer
ctcagctgaccccccttctgtcttgactttgacaatgacc

SEQ ID NO: 26227 - DNA, 40 bp, Artificial Sequence
  Description of Artificial Sequence: Synthetic primer
acacggagcgcccgagatgatggtgctggacaaggaggac

SEQ ID NO: 26228 - DNA, 40 bp, Artificial Sequence
  Description of Artificial Sequence: Synthetic primer
cgagggcaggcccgccgcggcgtcggggttggcagccgcg

SEQ ID NO: 26229 - DNA, 40 bp, Artificial Sequence
  Description of Artificial Sequence: Synthetic primer
actggggaagccggccacaagcccaggcccggctcactgc

SEQ ID NO: 26230 - DNA, 40 bp, Artificial Sequence
  Description of Artificial Sequence: Synthetic primer
ggtggcgcaaacgagtagcacggcgtctgctgcatcatgg

SEQ ID NO: 26231 - DNA, 40 bp, Artificial Sequence
  Description of Artificial Sequence: Synthetic primer
tggtgtaatctcaatgcaagccccaactttcttatccaac

SEQ ID NO: 26232 - DNA, 40 bp, Artificial Sequence
  Description of Artificial Sequence: Synthetic primer
ggggtagaggaaaggctccaaacacctgcaggttgggggc

SEQ ID NO: 26233 - DNA, 40 bp, Artificial Sequence
  Description of Artificial Sequence: Synthetic primer
cgcttctcactcaggcggtctgcagagatgctcaggtcac

SEQ ID NO: 26234 - DNA, 40 bp, Artificial Sequence
  Description of Artificial Sequence: Synthetic primer
aggaggccacagtcctgagggcttgtcctggccctgtcac

SEQ ID NO: 26235 - DNA, 40 bp, Artificial Sequence
  Description of Artificial Sequence: Synthetic primer
ctgtttttcttattctttacaggtgagaatgattaaatac

SEQ ID NO: 26236 - DNA, 40 bp, Artificial Sequence
  Description of Artificial Sequence: Synthetic primer
atctgtaatgaaagctgcagtttccctctttcctattttt

SEQ ID NO: 26237 - DNA, 40 bp, Artificial Sequence
  Description of Artificial Sequence: Synthetic primer
ttgagccatttagaaggtgagaatcaaagaaacggctctg

SEQ ID NO: 26238 - DNA, 40 bp, Artificial Sequence
  Description of Artificial Sequence: Synthetic primer
agcgcggctgagtgctccatctcaccgtcgagcaggtttc

SEQ ID NO: 26239 - DNA, 40 bp, Artificial Sequence
  Description of Artificial Sequence: Synthetic primer
acagtatatatttcatttccaaatgattctgtttctgaag

SEQ ID NO: 26240 - DNA, 40 bp, Artificial Sequence
  Description of Artificial Sequence: Synthetic primer
gccctttctttgtgaacgtcacattggccgagccgtgttc

SEQ ID NO: 26241 - DNA, 40 bp, Artificial Sequence
  Description of Artificial Sequence: Synthetic primer
aaaactccacttgccagaggcagcgagctagggagacacc

SEQ ID NO: 26242 - DNA, 40 bp, Artificial Sequence
  Description of Artificial Sequence: Synthetic primer
agccaccaccaccacaaactcgagcagggtgtggggtgtg

SEQ ID NO: 26243 - DNA, 40 bp, Artificial Sequence
  Description of Artificial Sequence: Synthetic primer
cgggccaagactggcaaggaccctgtggtgggggctggtg

SEQ ID NO: 26244 - DNA, 40 bp, Artificial Sequence
  Description of Artificial Sequence: Synthetic primer
ctgatgcaaatggatctgaacctttgaaaggatcaccacc

SEQ ID NO: 26245 - DNA, 40 bp, Artificial Sequence
  Description of Artificial Sequence: Synthetic primer
cggccacactcgcgcccgcccgccgctcactcactcgcgc

SEQ ID NO: 26246 - DNA, 40 bp, Artificial Sequence
  Description of Artificial Sequence: Synthetic primer
tcaaaaaattatttccaaaggtgtctgtcccttctaattt

SEQ ID NO: 26247 - DNA, 40 bp, Artificial Sequence
  Description of Artificial Sequence: Synthetic primer
atttggtacaaaaccactcgccagagctgtggtgtcagaa

SEQ ID NO: 26248 - DNA, 40 bp, Artificial Sequence
  Description of Artificial Sequence: Synthetic primer
gaaggtggctgaacaggaggagcggcagggcatgaaggtc

SEQ ID NO: 26249 - DNA, 40 bp, Artificial Sequence
  Description of Artificial Sequence: Synthetic primer
gggagagaagcagggcgtgaaggaggggcctctcccggcc

SEQ ID NO: 26250 - DNA, 40 bp, Artificial Sequence
  Description of Artificial Sequence: Synthetic primer
ccagcccactcctactgtcacaggcgccccaccattcaac

SEQ ID NO: 26251 - DNA, 40 bp, Artificial Sequence
  Description of Artificial Sequence: Synthetic primer
gagagatagcctgtggccctgtcctgccatgcaagaactc

SEQ ID NO: 26252 - DNA, 40 bp, Artificial Sequence
  Description of Artificial Sequence: Synthetic primer
ccttcatgtcggtctcggggagtcatggggcgtgggaaac

SEQ ID NO: 26253 - DNA, 40 bp, Artificial Sequence
  Description of Artificial Sequence: Synthetic primer
tcggtccagtcccggctttagcgctggtgaggaggaggag

SEQ ID NO: 26254 - DNA, 40 bp, Artificial Sequence
  Description of Artificial Sequence: Synthetic primer
cccacacaggctggcgggggccggccccgaggccgcgtgc

SEQ ID NO: 26255 - DNA, 40 bp, Artificial Sequence
  Description of Artificial Sequence: Synthetic primer
tggaggtatataacaagcacttggagggcaggcccagctt

SEQ ID NO: 26256 - DNA, 40 bp, Artificial Sequence
  Description of Artificial Sequence: Synthetic primer
acatttggtctcagaatttaggttcctgccctgttggttt

SEQ ID NO: 26257 - DNA, 40 bp, Artificial Sequence
  Description of Artificial Sequence: Synthetic primer
gtctagcgttcttttcagctatatctaattaagaaacaac

SEQ ID NO: 26258 - DNA, 40 bp, Artificial Sequence
  Description of Artificial Sequence: Synthetic primer
gatctgccttaataccaacagttcagggagcattttctgc

SEQ ID NO: 26259 - DNA, 40 bp, Artificial Sequence
  Description of Artificial Sequence: Synthetic primer
caaacattagtaaactactatgtggcgccaagggaaggac

SEQ ID NO: 26260 - DNA, 40 bp, Artificial Sequence
  Description of Artificial Sequence: Synthetic primer
atgagttacagcaaggctgttccaattcctgagcaaagag

SEQ ID NO: 26261 - DNA, 40 bp, Artificial Sequence
  Description of Artificial Sequence: Synthetic primer
gctgtacatcctggttgggcagcagggagaggacgcctgc

SEQ ID NO: 26262 - DNA, 40 bp, Artificial Sequence
  Description of Artificial Sequence: Synthetic primer
agggtggaagcggctccccattttataccaaaggtgctac

SEQ ID NO: 26263 - DNA, 40 bp, Artificial Sequence
  Description of Artificial Sequence: Synthetic primer
aagaaaatcaagaacagagctgtgaaaccgtagggcatcc

SEQ ID NO: 26264 - DNA, 40 bp, Artificial Sequence
  Description of Artificial Sequence: Synthetic primer
tgtgtcattacagcaagcagaagacttcatcctcccagac

SEQ ID NO: 26265 - DNA, 40 bp, Artificial Sequence
  Description of Artificial Sequence: Synthetic primer
ggaaattccccatcctgttttgcgtgctatgagggtcatt

SEQ ID NO: 26266 - DNA, 40 bp, Artificial Sequence
  Description of Artificial Sequence: Synthetic primer
ccgggttatactccgaataggccaggaggatgtagaatag

SEQ ID NO: 26267 - DNA, 40 bp, Artificial Sequence
  Description of Artificial Sequence: Synthetic primer
cgccggccctcgctggactccatggagaaccaggtctccg

SEQ ID NO: 26268 - DNA, 40 bp, Artificial Sequence
  Description of Artificial Sequence: Synthetic primer
atccacttcaaatgctgccaccccatcctgttttccaaga

SEQ ID NO: 26269 - DNA, 40 bp, Artificial Sequence
  Description of Artificial Sequence: Synthetic primer
tctgcagataaagaaaaattacaatatggatgggcctgga

SEQ ID NO: 26270 - DNA, 40 bp, Artificial Sequence
  Description of Artificial Sequence: Synthetic primer
cacataaatctcaaatcctatgttgctacaaggggtcatc

SEQ ID NO: 26271 - DNA, 40 bp, Artificial Sequence
  Description of Artificial Sequence: Synthetic primer
ccggagcgccagctcagcgtgcccatcccggggggcagca

SEQ ID NO: 26272 - DNA, 40 bp, Artificial Sequence
  Description of Artificial Sequence: Synthetic primer
gcttcagccagacgggccacagcccccacatccaccagac

SEQ ID NO: 26273 - DNA, 40 bp, Artificial Sequence
  Description of Artificial Sequence: Synthetic primer
tggagatggcactcaaaataagagaaaaatagcacttgag

SEQ ID NO: 26274 - DNA, 40 bp, Artificial Sequence
  Description of Artificial Sequence: Synthetic primer
atcctgaccaaacagacacccacacctcttatagagtaca

SEQ ID NO: 26275 - DNA, 40 bp, Artificial Sequence
  Description of Artificial Sequence: Synthetic primer
cagctatttacttagagcaaatgattagttttagaaggat

SEQ ID NO: 26276 - DNA, 40 bp, Artificial Sequence
  Description of Artificial Sequence: Synthetic primer
tgcccctcaaccacctgcctgggatgcccgacacccacct

SEQ ID NO: 26277 - DNA, 40 bp, Artificial Sequence
  Description of Artificial Sequence: Synthetic primer
caaagtgtacaccaatttgatggatgggactttgatttct

SEQ ID NO: 26278 - DNA, 40 bp, Artificial Sequence
  Description of Artificial Sequence: Synthetic primer
cgtctccgtttggaccagcccaagttggatgaagtaactc

SEQ ID NO: 26279 - DNA, 40 bp, Artificial Sequence
  Description of Artificial Sequence: Synthetic primer
tggttggatggcatcgatgaggtccagaacaggcagactt

SEQ ID NO: 26280 - DNA, 40 bp, Artificial Sequence
  Description of Artificial Sequence: Synthetic primer
atgttgcaggcagagaagaagctcttagaagaggatgtca

SEQ ID NO: 26281 - DNA, 40 bp, Artificial Sequence
  Description of Artificial Sequence: Synthetic primer
aaccagttaccagctgcacttcgcacggccatcccgtcca

SEQ ID NO: 26282 - DNA, 40 bp, Artificial Sequence
  Description of Artificial Sequence: Synthetic primer
tgttttggtaggtgtgaggacattccgaaacacggccatc

SEQ ID NO: 26283 - DNA, 40 bp, Artificial Sequence
  Description of Artificial Sequence: Synthetic primer
gatgggaaggagggaggaggaggaaggggctgtcgttctg

SEQ ID NO: 26284 - DNA, 40 bp, Artificial Sequence
  Description of Artificial Sequence: Synthetic primer
gcctgcaaaaagttccctgagcctgtaagcactccaggtg

SEQ ID NO: 26285 - DNA, 40 bp, Artificial Sequence
  Description of Artificial Sequence: Synthetic primer
ccatggcggcaaagccctcagccctacacatctagagacc

SEQ ID NO: 26286 - DNA, 40 bp, Artificial Sequence
  Description of Artificial Sequence: Synthetic primer
gttacttacacgccaagtcaatcatccacagagacctcaa

SEQ ID NO: 26287 - DNA, 40 bp, Artificial Sequence
  Description of Artificial Sequence: Synthetic primer
agtgagcagtaaatcaatggaacatcccaagaagaggata

SEQ ID NO: 26288 - DNA, 40 bp, Artificial Sequence
  Description of Artificial Sequence: Synthetic primer
ggttcctggactcctcacctccaggatgagcactgcagtg

SEQ ID NO: 26289 - DNA, 40 bp, Artificial Sequence
  Description of Artificial Sequence: Synthetic primer
attgccagggccatccctggtgcttcccgttctattactt

SEQ ID NO: 26290 - DNA, 40 bp, Artificial Sequence
  Description of Artificial Sequence: Synthetic primer
gtggtctctggaatgagttagattctttgaaggatgcagt

SEQ ID NO: 26291 - DNA, 40 bp, Artificial Sequence
  Description of Artificial Sequence: Synthetic primer
cctgcacagccgtgctgcctgctgattgcagagcgcatcc

SEQ ID NO: 26292 - DNA, 40 bp, Artificial Sequence
  Description of Artificial Sequence: Synthetic primer
gccctgaatcagatgcaggcctctggtgtttgcaaaggat

SEQ ID NO: 26293 - DNA, 40 bp, Artificial Sequence
  Description of Artificial Sequence: Synthetic primer
tccaaaaatctcacagttggatggtgttgatgatgggaca

SEQ ID NO: 26294 - DNA, 40 bp, Artificial Sequence
  Description of Artificial Sequence: Synthetic primer
ctgaagataaatcttggtccattggccgtgtcatccttgt

SEQ ID NO: 26295 - DNA, 40 bp, Artificial Sequence
  Description of Artificial Sequence: Synthetic primer
taatggataaagttttatggctctttatgcatccactcat

SEQ ID NO: 26296 - DNA, 40 bp, Artificial Sequence
  Description of Artificial Sequence: Synthetic primer
ataaatgtagaaattttaagaaaggacatccttatttgct

SEQ ID NO: 26297 - DNA, 40 bp, Artificial Sequence
  Description of Artificial Sequence: Synthetic primer
atccagaacatttctaacaacaagacagagagaagcacag

SEQ ID NO: 26298 - DNA, 40 bp, Artificial Sequence
  Description of Artificial Sequence: Synthetic primer
gtggcaggtcactgtcactgccgacatccctcccccagca

SEQ ID NO: 26299 - DNA, 40 bp, Artificial Sequence
  Description of Artificial Sequence: Synthetic primer
atgatataggcccgagtccccgggcatctttggggaggtg

SEQ ID NO: 26300 - DNA, 40 bp, Artificial Sequence
  Description of Artificial Sequence: Synthetic primer
agctgggagatccgggacaggctgctgaaggatgggcact

SEQ ID NO: 26301 - DNA, 40 bp, Artificial Sequence
  Description of Artificial Sequence: Synthetic primer
ttggtgtggactcagagcaatttacaagagctgttcatgc

SEQ ID NO: 26302 - DNA, 40 bp, Artificial Sequence
  Description of Artificial Sequence: Synthetic primer
tccctcccatcgaggacggagaagttctaatgtggcagga

SEQ ID NO: 26303 - DNA, 40 bp, Artificial Sequence
  Description of Artificial Sequence: Synthetic primer
cgatgtgtgtgagaactgccattatcccatagtcccactg

SEQ ID NO: 26304 - DNA, 40 bp, Artificial Sequence
  Description of Artificial Sequence: Synthetic primer
gtgcccgaccctatcccggcggagtctccccatcctcctt

SEQ ID NO: 26305 - DNA, 40 bp, Artificial Sequence
  Description of Artificial Sequence: Synthetic primer
gtgagccagctttgcctccgtttgcctctggatgcagctt

SEQ ID NO: 26306 - DNA, 40 bp, Artificial Sequence
  Description of Artificial Sequence: Synthetic primer
gtagagaaggaaaaacaagaacttcaggatgataaaagaa

SEQ ID NO: 26307 - DNA, 40 bp, Artificial Sequence
  Description of Artificial Sequence: Synthetic primer
tccagctccacataagtgggacggcggcccaaacgcactg

SEQ ID NO: 26308 - DNA, 40 bp, Artificial Sequence
  Description of Artificial Sequence: Synthetic primer
gaatgtggagtcacttccatcattaaaggcatcctggatc

SEQ ID NO: 26309 - DNA, 40 bp, Artificial Sequence
  Description of Artificial Sequence: Synthetic primer
actgggggatccggagaccaacggtaagggcggctctcat

SEQ ID NO: 26310 - DNA, 40 bp, Artificial Sequence
  Description of Artificial Sequence: Synthetic primer
agccaagtccatagtcctgtgacttgccaggttcatcatc

SEQ ID NO: 26311 - DNA, 40 bp, Artificial Sequence
  Description of Artificial Sequence: Synthetic primer
cggtcaccagcacattgcgggcagccaggtccctgtggat

SEQ ID NO: 26312 - DNA, 40 bp, Artificial Sequence
  Description of Artificial Sequence: Synthetic primer
caacaggaactttgatcttttcatagagctggaagatgac

SEQ ID NO: 26313 - DNA, 40 bp, Artificial Sequence
  Description of Artificial Sequence: Synthetic primer
aaagaaggcagtggatgtcttctttcctccagaagcacaa

SEQ ID NO: 26314 - DNA, 40 bp, Artificial Sequence
  Description of Artificial Sequence: Synthetic primer
gcacggccagcagcttcttgtccatccgctcgggccgtgt

SEQ ID NO: 26315 - DNA, 40 bp, Artificial Sequence
  Description of Artificial Sequence: Synthetic primer
atccccacagggacattcacaacatgaataatggaagcac

SEQ ID NO: 26316 - DNA, 40 bp, Artificial Sequence
  Description of Artificial Sequence: Synthetic primer
agggaaatttggtcccagagaaagggaactgattctgaac

SEQ ID NO: 26317 - DNA, 40 bp, Artificial Sequence
  Description of Artificial Sequence: Synthetic primer
aagaagaccttcctaagagacaattagggatgagtttgat

SEQ ID NO: 26318 - DNA, 40 bp, Artificial Sequence
  Description of Artificial Sequence: Synthetic primer
ggtgctgcacaatgactccgacatcctcttccctgtcagt

SEQ ID NO: 26319 - DNA, 40 bp, Artificial Sequence
  Description of Artificial Sequence: Synthetic primer
ctaccggcggcccctggagcagcagcagcctcaccacatc

SEQ ID NO: 26320 - DNA, 40 bp, Artificial Sequence
  Description of Artificial Sequence: Synthetic primer
gctcaggaaacgtggaggccaccttgcttctcacaaaatg

SEQ ID NO: 26321 - DNA, 40 bp, Artificial Sequence
  Description of Artificial Sequence: Synthetic primer
tggtcctagtaggatggccagttcatgggtaaaacctcct

SEQ ID NO: 26322 - DNA, 40 bp, Artificial Sequence
  Description of Artificial Sequence: Synthetic primer
aggggctgctggcacagtcatccaggttgatctcgcagtt

SEQ ID NO: 26323 - DNA, 40 bp, Artificial Sequence
  Description of Artificial Sequence: Synthetic primer
ctgggcgtctgttctttaccaaaaccatccatccctagaa

SEQ ID NO: 26324 - DNA, 40 bp, Artificial Sequence
  Description of Artificial Sequence: Synthetic primer
ccgccattgcctcccatgaggatgtggacaaagtggcatt

SEQ ID NO: 26325 - DNA, 40 bp, Artificial Sequence
  Description of Artificial Sequence: Synthetic primer
gactcagggctggttcagggctgaggtttccgggggatga

SEQ ID NO: 26326 - DNA, 40 bp, Artificial Sequence
  Description of Artificial Sequence: Synthetic primer
ggcgagctcggatctgacgcacctcccaggccggagcgtc

SEQ ID NO: 26327 - DNA, 40 bp, Artificial Sequence
  Description of Artificial Sequence: Synthetic primer
gatcaacataggcctgggtgaagatggggctcacgaaatg

SEQ ID NO: 26328 - DNA, 40 bp, Artificial Sequence
  Description of Artificial Sequence: Synthetic primer
cctagtttgcgtcagtgacagaacttactgcttagtcttt

SEQ ID NO: 26329 - DNA, 40 bp, Artificial Sequence
  Description of Artificial Sequence: Synthetic primer
ggtggttcttacatccccctctgcaaagtgccctcttggt

SEQ ID NO: 26330 - DNA, 40 bp, Artificial Sequence
  Description of Artificial Sequence: Synthetic primer
gcggaggagaacaaacagatcatccgcaaacacgcgcaga

SEQ ID NO: 26331 - DNA, 40 bp, Artificial Sequence
  Description of Artificial Sequence: Synthetic primer
ggtgtagatgccttcaaacaggctttcgggggccatccat

SEQ ID NO: 26332 - DNA, 40 bp, Artificial Sequence
  Description of Artificial Sequence: Synthetic primer
cacctcactcctccttccccagtacatcagactggttagg

SEQ ID NO: 26333 - DNA, 40 bp, Artificial Sequence
  Description of Artificial Sequence: Synthetic primer
tcctccccacccaccatggttcattccgacttttccaatg

SEQ ID NO: 26334 - DNA, 40 bp, Artificial Sequence
  Description of Artificial Sequence: Synthetic primer
cttggaaggtgttgtggatgttcctgaattcttggtctat

SEQ ID NO: 26335 - DNA, 40 bp, Artificial Sequence
  Description of Artificial Sequence: Synthetic primer
gggtgacggtggtggtagtggatgacggagtggaacacac

SEQ ID NO: 26336 - DNA, 40 bp, Artificial Sequence
  Description of Artificial Sequence: Synthetic primer
cacagggacccatttgtagattcgtagggatgtgtcacca

SEQ ID NO: 26337 - DNA, 40 bp, Artificial Sequence
  Description of Artificial Sequence: Synthetic primer
agtgggacattcggacggatggagccctcagcgtgtcttt

SEQ ID NO: 26338 - DNA, 40 bp, Artificial Sequence
  Description of Artificial Sequence: Synthetic primer
gctctgctctcatgcgtttccaaactctgcttccgctctg

SEQ ID NO: 26339 - DNA, 40 bp, Artificial Sequence
  Description of Artificial Sequence: Synthetic primer
tcttctgtctgtcttagctgactcacaagatcatccacat

SEQ ID NO: 26340 - DNA, 40 bp, Artificial Sequence
  Description of Artificial Sequence: Synthetic primer
ggagggagggtgggcagggctggaggatgggagggagcac

SEQ ID NO: 26341 - DNA, 40 bp, Artificial Sequence
  Description of Artificial Sequence: Synthetic primer
cggccgctccctccggccgcacggccggggccccaagcgg

SEQ ID NO: 26342 - DNA, 40 bp, Artificial Sequence
  Description of Artificial Sequence: Synthetic primer
gcaaagaaatggagtaacgaaacttatggatggagctttt

SEQ ID NO: 26343 - DNA, 40 bp, Artificial Sequence
  Description of Artificial Sequence: Synthetic primer
gctggagcaggtgctgctcctttcagagaagtggatgaga

SEQ ID NO: 26344 - DNA, 40 bp, Artificial Sequence
  Description of Artificial Sequence: Synthetic primer
gtcaccccacactcctcaatggcaggtcaggaccctaaag

SEQ ID NO: 26345 - DNA, 40 bp, Artificial Sequence
  Description of Artificial Sequence: Synthetic primer
aagttttcttcaaaaatggatggggtgtcttcagaggcta

SEQ ID NO: 26346 - DNA, 40 bp, Artificial Sequence
  Description of Artificial Sequence: Synthetic primer
aagcattcattatttcacccaagtggatgtccagccctgt

SEQ ID NO: 26347 - DNA, 40 bp, Artificial Sequence
  Description of Artificial Sequence: Synthetic primer
attactcttgaggtctctgtggatgattgacttggcgtgt

SEQ ID NO: 26348 - DNA, 40 bp, Artificial Sequence
  Description of Artificial Sequence: Synthetic primer
ccctgacctcctgaggcatggtgaggactgaggggatgct

SEQ ID NO: 26349 - DNA, 40 bp, Artificial Sequence
  Description of Artificial Sequence: Synthetic primer
gtcttgtgagccctcttccctgataccaccatccacatag

SEQ ID NO: 26350 - DNA, 40 bp, Artificial Sequence
  Description of Artificial Sequence: Synthetic primer
cctctggattaatagtgaaaaatctgtcgaggtcagtgtg

SEQ ID NO: 26351 - DNA, 40 bp, Artificial Sequence
  Description of Artificial Sequence: Synthetic primer
ctttcagacctgcaggagctgtgggatgatctctgtgaag

SEQ ID NO: 26352 - DNA, 40 bp, Artificial Sequence
  Description of Artificial Sequence: Synthetic primer
agaaaaagaaaaaggaagcagaggaagaggatgaggaact

SEQ ID NO: 26353 - DNA, 40 bp, Artificial Sequence
  Description of Artificial Sequence: Synthetic primer
tccggaggaaagccgagctagccgccacgctggggctctc

SEQ ID NO: 26354 - DNA, 40 bp, Artificial Sequence
  Description of Artificial Sequence: Synthetic primer
ctccgtcagctcattgagggcatcctgtagctgctgcaga

SEQ ID NO: 26355 - DNA, 40 bp, Artificial Sequence
  Description of Artificial Sequence: Synthetic primer
ttctgcttagcatgacgataagcaagtcggatggtcttct

SEQ ID NO: 26356 - DNA, 40 bp, Artificial Sequence
  Description of Artificial Sequence: Synthetic primer
tagatgtgacaattcatcctcccatctaacctcaaattat

SEQ ID NO: 26357 - DNA, 40 bp, Artificial Sequence
  Description of Artificial Sequence: Synthetic primer
cagatgctaatttgggaaaaagctccaggattctgacagg

SEQ ID NO: 26358 - DNA, 40 bp, Artificial Sequence
  Description of Artificial Sequence: Synthetic primer
aagaggaaagcacagtcttattgagcgtggcttggatgga

SEQ ID NO: 26359 - DNA, 40 bp, Artificial Sequence
  Description of Artificial Sequence: Synthetic primer
tttcagttttaaaataaagtgtaatctgtgttttcatcct

SEQ ID NO: 26360 - DNA, 40 bp, Artificial Sequence
  Description of Artificial Sequence: Synthetic primer
gccttagcatgtgactcctgaagggaaggcaaaggcagag

SEQ ID NO: 26361 - DNA, 40 bp, Artificial Sequence
  Description of Artificial Sequence: Synthetic primer
tgttgggcgagacggtgaaaggcgaagggttcatgtatgg

SEQ ID NO: 26362 - DNA, 40 bp, Artificial Sequence
  Description of Artificial Sequence: Synthetic primer
gatagaggtattttcgaagggcgttgtggtcactgctacc

SEQ ID NO: 26363 - DNA, 40 bp, Artificial Sequence
  Description of Artificial Sequence: Synthetic primer
agagacgctgaaagcaccatggacgggttttatgatcagc

SEQ ID NO: 26364 - DNA, 40 bp, Artificial Sequence
  Description of Artificial Sequence: Synthetic primer
ttagataaagcgcaaatgcttctataataactactgttcc

SEQ ID NO: 26365 - DNA, 40 bp, Artificial Sequence
  Description of Artificial Sequence: Synthetic primer
gactagcaggcctgaagaggccaacatggtgccagacttg

SEQ ID NO: 26366 - DNA, 40 bp, Artificial Sequence
  Description of Artificial Sequence: Synthetic primer
aggcccggcctgtgcttcccctcctgggatggggtgaatg

SEQ ID NO: 26367 - DNA, 40 bp, Artificial Sequence
  Description of Artificial Sequence: Synthetic primer
tccctttgctgggaattctgcaccaatgtctcccctcaac

SEQ ID NO: 26368 - DNA, 40 bp, Artificial Sequence
  Description of Artificial Sequence: Synthetic primer
gtgactctttattgggcttgcctgagggtgctttgatctc

SEQ ID NO: 26369 - DNA, 40 bp, Artificial Sequence
  Description of Artificial Sequence: Synthetic primer
ggggagcagagtttgatcctgtctacttcacaaacaacag

SEQ ID NO: 26370 - DNA, 40 bp, Artificial Sequence
  Description of Artificial Sequence: Synthetic primer
ggaagaagtcttcatcacatgattctgggactgatattac

SEQ ID NO: 26371 - DNA, 40 bp, Artificial Sequence
  Description of Artificial Sequence: Synthetic primer
attaaaaagcttatgcattagggtgcttctctgcacaatg

SEQ ID NO: 26372 - DNA, 40 bp, Artificial Sequence
  Description of Artificial Sequence: Synthetic primer
attgaatgttaacctcatcagattttgggttgagctacag

SEQ ID NO: 26373 - DNA, 40 bp, Artificial Sequence
  Description of Artificial Sequence: Synthetic primer
gggcccctgacaaggacaaacagaaacaggagccgaagac

SEQ ID NO: 26374 - DNA, 40 bp, Artificial Sequence
  Description of Artificial Sequence: Synthetic primer
atccttgtacataaattgcactgttgtcagagtcttcatc

SEQ ID NO: 26375 - DNA, 40 bp, Artificial Sequence
  Description of Artificial Sequence: Synthetic primer
tgaactggatacagctgtcagccggcgaggccattttgtc

SEQ ID NO: 26376 - DNA, 40 bp, Artificial Sequence
  Description of Artificial Sequence: Synthetic primer
gtcactgagttggcccttctgcgccatggtgccttgttgg

SEQ ID NO: 26377 - DNA, 40 bp, Artificial Sequence
  Description of Artificial Sequence: Synthetic primer
taccatacatgtccagcatgcaggattaatatttttaatg

SEQ ID NO: 26378 - DNA, 40 bp, Artificial Sequence
  Description of Artificial Sequence: Synthetic primer
aggccacacagccaacgtgccatgtgctacagccaaaatg

SEQ ID NO: 26379 - DNA, 40 bp, Artificial Sequence
  Description of Artificial Sequence: Synthetic primer
ttaaatgtagttatatttgaataaaaaatgaatcatttcc

SEQ ID NO: 26380 - DNA, 40 bp, Artificial Sequence
  Description of Artificial Sequence: Synthetic primer
gactgtgactttgttggtcttcacgcactgggtgtgtctg

SEQ ID NO: 26381 - DNA, 40 bp, Artificial Sequence
  Description of Artificial Sequence: Synthetic primer
ggtgtgatacttttggtgctgtgtatagtattgtatgtcg

SEQ ID NO: 26382 - DNA, 40 bp, Artificial Sequence
  Description of Artificial Sequence: Synthetic primer
cccaagtgccactggcgtcatcatcattgcgaccctggag

SEQ ID NO: 26383 - DNA, 40 bp, Artificial Sequence
  Description of Artificial Sequence: Synthetic primer
tgtggccggaagatgcatcagatttgcgttctgcactatg

SEQ ID NO: 26384 - DNA, 40 bp, Artificial Sequence
  Description of Artificial Sequence: Synthetic primer
tcacttttcccggcctgcatgaactggtccgccattacac

SEQ ID NO: 26385 - DNA, 40 bp, Artificial Sequence
  Description of Artificial Sequence: Synthetic primer
tccgctctgaatgagaatgtcaaacaggtcgtccatctgc

SEQ ID NO: 26386 - DNA, 40 bp, Artificial Sequence
  Description of Artificial Sequence: Synthetic primer
aaacagagatgagaatagtcacaaactcttctttttgtag

SEQ ID NO: 26387 - DNA, 40 bp, Artificial Sequence
  Description of Artificial Sequence: Synthetic primer
ttctcccagtttgattccaaatgcttttccccaaattgtc

SEQ ID NO: 26388 - DNA, 40 bp, Artificial Sequence
  Description of Artificial Sequence: Synthetic primer
tagaagttactaaacaaatatttctcccaaaactcaaaag

SEQ ID NO: 26389 - DNA, 40 bp, Artificial Sequence
  Description of Artificial Sequence: Synthetic primer
tagtatttatattgaagcttgtatttttaactgttgcttg

SEQ ID NO: 26390 - DNA, 40 bp, Artificial Sequence
  Description of Artificial Sequence: Synthetic primer
cttaatttggtaacttctaatgaaaaaaataaaaaataga

SEQ ID NO: 26391 - DNA, 40 bp, Artificial Sequence
  Description of Artificial Sequence: Synthetic primer
gggacgctcctcggagagcagctgcggcgtcgacggcgac

SEQ ID NO: 26392 - DNA, 40 bp, Artificial Sequence
  Description of Artificial Sequence: Synthetic primer
agccacggtatatacacttgtaactgaaaattctgaaatc

SEQ ID NO: 26393 - DNA, 40 bp, Artificial Sequence
  Description of Artificial Sequence: Synthetic primer
aggcactcagggcttcgggctcggactgccaggtgtactg

SEQ ID NO: 26394 - DNA, 40 bp, Artificial Sequence
  Description of Artificial Sequence: Synthetic primer
gttaaaattacgtgaactcaacttatcatataacaaaatc

SEQ ID NO: 26395 - DNA, 40 bp, Artificial Sequence
  Description of Artificial Sequence: Synthetic primer
ggggcccacctctgcctgtgcctgaggcgggcacatggac

SEQ ID NO: 26396 - DNA, 40 bp, Artificial Sequence
  Description of Artificial Sequence: Synthetic primer
ctcatgatttattgaacttgcagcctaacttttacctacc

SEQ ID NO: 26397 - DNA, 40 bp, Artificial Sequence
  Description of Artificial Sequence: Synthetic primer
aaggaggtttcagagcttattcttgataactataataatg

SEQ ID NO: 26398 - DNA, 40 bp, Artificial Sequence
  Description of Artificial Sequence: Synthetic primer
agtccctcctgggaagtaatccgagcccgggttgccggcc

SEQ ID NO: 26399 - DNA, 40 bp, Artificial Sequence
  Description of Artificial Sequence: Synthetic primer
gtcgtccagcccaccagccagcgaggccatggctgaatac

SEQ ID NO: 26400 - DNA, 40 bp, Artificial Sequence
  Description of Artificial Sequence: Synthetic primer
ccgagccagatactacatttggaaacgatactgctacatc

SEQ ID NO: 26401 - DNA, 40 bp, Artificial Sequence
  Description of Artificial Sequence: Synthetic primer
tgcccgaagccagttctaaatttttatgaagccaatttcc

SEQ ID NO: 26402 - DNA, 40 bp, Artificial Sequence
  Description of Artificial Sequence: Synthetic primer
gcaggtacttctccttcagggctcccacggggtctgtgac

SEQ ID NO: 26403 - DNA, 40 bp, Artificial Sequence
  Description of Artificial Sequence: Synthetic primer
gaactggagagatatgtcaagtcttgtttacagaaaaagc

SEQ ID NO: 26404 - DNA, 40 bp, Artificial Sequence
  Description of Artificial Sequence: Synthetic primer
ttcatctccaggtctctctgccgctctgtgagggctttcc

SEQ ID NO: 26405 - DNA, 40 bp, Artificial Sequence
  Description of Artificial Sequence: Synthetic primer
agatctccaagagaaatgtgacatttgggaaaaaaagttg

SEQ ID NO: 26406 - DNA, 40 bp, Artificial Sequence
  Description of Artificial Sequence: Synthetic primer
ctctgtcaagaactttcccgttgtttcccgcgtccaccac

SEQ ID NO: 26407 - DNA, 40 bp, Artificial Sequence
  Description of Artificial Sequence: Synthetic primer
atcattctatttttatccaaaagtataaattttgctttgg

SEQ ID NO: 26408 - DNA, 40 bp, Artificial Sequence
  Description of Artificial Sequence: Synthetic primer
tgccaaatttccgcaaatcagagtaagagaacccctgaag

SEQ ID NO: 26409 - DNA, 40 bp, Artificial Sequence
  Description of Artificial Sequence: Synthetic primer
gctcaagaatctatgaccttatataaagaaatccaaaatg

SEQ ID NO: 26410 - DNA, 40 bp, Artificial Sequence
  Description of Artificial Sequence: Synthetic primer
tggtcactaaatattatggaccctgaactggcttctatgc

SEQ ID NO: 26411 - DNA, 40 bp, Artificial Sequence
  Description of Artificial Sequence: Synthetic primer
agccctggttagccacctggccatgctgagccccagcacc

SEQ ID NO: 26412 - DNA, 40 bp, Artificial Sequence
  Description of Artificial Sequence: Synthetic primer
agggcttgatgagatgttggccaaatctgaacgacatgtc

SEQ ID NO: 26413 - DNA, 40 bp, Artificial Sequence
  Description of Artificial Sequence: Synthetic primer
cgccgagctggggtagctgatcactgagctgaaactaaac

SEQ ID NO: 26414 - DNA, 40 bp, Artificial Sequence
  Description of Artificial Sequence: Synthetic primer
attcaagagtcaagcaccaaaactggacagctgcctctac

SEQ ID NO: 26415 - DNA, 40 bp, Artificial Sequence
  Description of Artificial Sequence: Synthetic primer
gatctaatagtatcattatacttaagcaatcatattcctg

SEQ ID NO: 26416 - DNA, 40 bp, Artificial Sequence
  Description of Artificial Sequence: Synthetic primer
cgatgccatgaaccgcgaagtcagctccctaaagaacaag

SEQ ID NO: 26417 - DNA, 40 bp, Artificial Sequence
  Description of Artificial Sequence: Synthetic primer
aaagaaatgaggaacaactgggaaaaggaaatcgcagctg

SEQ ID NO: 26418 - DNA, 40 bp, Artificial Sequence
  Description of Artificial Sequence: Synthetic primer
acacttcgcgccgccaatggcaagttggagggagagatgc

SEQ ID NO: 26419 - DNA, 40 bp, Artificial Sequence
  Description of Artificial Sequence: Synthetic primer
atgcacaaggaaaaccaaagaaagtcaatataattgaagg

SEQ ID NO: 26420 - DNA, 40 bp, Artificial Sequence
  Description of Artificial Sequence: Synthetic primer
tagagtttaatgagaaaccatttattctacaaagaaatac

SEQ ID NO: 26421 - DNA, 40 bp, Artificial Sequence
  Description of Artificial Sequence: Synthetic primer
cccgaaaacaccttagtttgcaccgagagaccatttgcag

SEQ ID NO: 26422 - DNA, 40 bp, Artificial Sequence
  Description of Artificial Sequence: Synthetic primer
gggctgagagagggctgcaagctgctcgtgcacggctttg

SEQ ID NO: 26423 - DNA, 40 bp, Artificial Sequence
  Description of Artificial Sequence: Synthetic primer
tgaggatttgaaggaaaacctcatcagggaatatgtgaag

SEQ ID NO: 26424 - DNA, 40 bp, Artificial Sequence
  Description of Artificial Sequence: Synthetic primer
aggctttatcaacatcatctgaagtcaaatgtggaagagg

SEQ ID NO: 26425 - DNA, 40 bp, Artificial Sequence
  Description of Artificial Sequence: Synthetic primer
gcaacccggagcgcgcaccgcaggccggcggccgagctcg

SEQ ID NO: 26426 - DNA, 40 bp, Artificial Sequence
  Description of Artificial Sequence: Synthetic primer
taagctttaacaatctaaaggaatacacattgcacccttg

SEQ ID NO: 26427 - DNA, 40 bp, Artificial Sequence
  Description of Artificial Sequence: Synthetic primer
cggccaaaggccttgcagccgccatgcaacctcctgatgc

SEQ ID NO: 26428 - DNA, 40 bp, Artificial Sequence
  Description of Artificial Sequence: Synthetic primer
tcctgcaccaggctgtctcggtcatcctgaacttggagca

SEQ ID NO: 26429 - DNA, 40 bp, Artificial Sequence
  Description of Artificial Sequence: Synthetic primer
cgcgccgagccgggtcgcactaactccctcggcgccgacg

SEQ ID NO: 26430 - DNA, 40 bp, Artificial Sequence
  Description of Artificial Sequence: Synthetic primer
aataccaatcaaatattgaaaattcctttgttcaaaacac

SEQ ID NO: 26431 - DNA, 40 bp, Artificial Sequence
  Description of Artificial Sequence: Synthetic primer
tggcggtgacttttagtgcatccaagattggaatggtatc

SEQ ID NO: 26432 - DNA, 40 bp, Artificial Sequence
  Description of Artificial Sequence: Synthetic primer
gctttgagcccaaaatgagatatattttttattactgtag

SEQ ID NO: 26433 - DNA, 40 bp, Artificial Sequence
  Description of Artificial Sequence: Synthetic primer
tgccattgtgtcattttgaccttcaattacctggtacaac

SEQ ID NO: 26434 - DNA, 40 bp, Artificial Sequence
  Description of Artificial Sequence: Synthetic primer
tttgaacattaccctagaaagtagtatcttactacaaatc

SEQ ID NO: 26435 - DNA, 40 bp, Artificial Sequence
  Description of Artificial Sequence: Synthetic primer
tggggctggcgctcagggcccggtggcgggcgacgcggcc

SEQ ID NO: 26436 - DNA, 40 bp, Artificial Sequence
  Description of Artificial Sequence: Synthetic primer
cgatactccaaatccaacaacctgcagtcacctccaggac

SEQ ID NO: 26437 - DNA, 40 bp, Artificial Sequence
  Description of Artificial Sequence: Synthetic primer
ctgatggcccctacctggtgatcgtggaacagcctaagca

SEQ ID NO: 26438 - DNA, 40 bp, Artificial Sequence
  Description of Artificial Sequence: Synthetic primer
ctgtgaaaggtctggtatatcacctctgtcaattccaact

SEQ ID NO: 26439 - DNA, 40 bp, Artificial Sequence
  Description of Artificial Sequence: Synthetic primer
ccccaaattttgaggcaaaaacggaatcattctggtttac

SEQ ID NO: 26440 - DNA, 40 bp, Artificial Sequence
  Description of Artificial Sequence: Synthetic primer
tcggtcccgctccggcgcgtccctcctccggccccagcac

SEQ ID NO: 26441 - DNA, 40 bp, Artificial Sequence
  Description of Artificial Sequence: Synthetic primer
caacctgctcaccttccttttccttctggaccacctgaaa

SEQ ID NO: 26442 - DNA, 40 bp, Artificial Sequence
  Description of Artificial Sequence: Synthetic primer
ggctccagtgtgctggtgtggtctggtgtgctgctgtgtc

SEQ ID NO: 26443 - DNA, 40 bp, Artificial Sequence
  Description of Artificial Sequence: Synthetic primer
tgaaaatggttgtaaatcttcaataagagctatactgtcc

SEQ ID NO: 26444 - DNA, 40 bp, Artificial Sequence
  Description of Artificial Sequence: Synthetic primer
atagtgaggctggccaagctgcactggtcggaccaggcag

SEQ ID NO: 26445 - DNA, 40 bp, Artificial Sequence
  Description of Artificial Sequence: Synthetic primer
agtgtgactcttgatgctgtactgcagggagaccgagaac

SEQ ID NO: 26446 - DNA, 40 bp, Artificial Sequence
  Description of Artificial Sequence: Synthetic primer
ctaaatgaggccattacctagattgtcccttcagtaggag

SEQ ID NO: 26447 - DNA, 40 bp, Artificial Sequence
  Description of Artificial Sequence: Synthetic primer
tctcaaatgtgaccatgtgaatctgggtgggataatggac

SEQ ID NO: 26448 - DNA, 40 bp, Artificial Sequence
  Description of Artificial Sequence: Synthetic primer
gtgggtgtagatccggtcaaataatgcctcgggtgccatc

SEQ ID NO: 26449 - DNA, 40 bp, Artificial Sequence
  Description of Artificial Sequence: Synthetic primer
caaacagactgctgtctgcccttatacgacacagtaaatc

SEQ ID NO: 26450 - DNA, 40 bp, Artificial Sequence
  Description of Artificial Sequence: Synthetic primer
atatgctattctcagatcttaataaaaacatgggttaaag

SEQ ID NO: 26451 - DNA, 40 bp, Artificial Sequence
  Description of Artificial Sequence: Synthetic primer
ctgtctgtatcatcaaattttgagccttttgcaacagatg

SEQ ID NO: 26452 - DNA, 40 bp, Artificial Sequence
  Description of Artificial Sequence: Synthetic primer
aagagaaaatgcggttataaaaaatggttcagaattaaac

SEQ ID NO: 26453 - DNA, 40 bp, Artificial Sequence
  Description of Artificial Sequence: Synthetic primer
gtagcaccatgaagagttgtagcccaagttacattagcag

SEQ ID NO: 26454 - DNA, 40 bp, Artificial Sequence
  Description of Artificial Sequence: Synthetic primer
acgaagagccacagtgccaggaaagagaattagagatcag

SEQ ID NO: 26455 - DNA, 40 bp, Artificial Sequence
  Description of Artificial Sequence: Synthetic primer
ggaccccagcagctgcagctgctaaagcagccgccaaagc

SEQ ID NO: 26456 - DNA, 40 bp, Artificial Sequence
  Description of Artificial Sequence: Synthetic primer
ctgattttgctggcgcataagttcatttagcatttgtttc

SEQ ID NO: 26457 - DNA, 40 bp, Artificial Sequence
  Description of Artificial Sequence: Synthetic primer
aactgtaggttatttaaaataaattcctacaacttaatgg

SEQ ID NO: 26458 - DNA, 40 bp, Artificial Sequence
  Description of Artificial Sequence: Synthetic primer
cctgaaagctctctggctggaagtcctgatactgaatctc

SEQ ID NO: 26459 - DNA, 40 bp, Artificial Sequence
  Description of Artificial Sequence: Synthetic primer
gctggaacgcttcctgcgtattagtagtgtcttttgaaac

SEQ ID NO: 26460 - DNA, 40 bp, Artificial Sequence
  Description of Artificial Sequence: Synthetic primer
ggacagcttcgacttagccctgctccaggaatgggacctc

SEQ ID NO: 26461 - DNA, 40 bp, Artificial Sequence
  Description of Artificial Sequence: Synthetic primer
tcttgacattggcgtgtttgctcagggcagccatgatgac

SEQ ID NO: 26462 - DNA, 40 bp, Artificial Sequence
  Description of Artificial Sequence: Synthetic primer
cgagcccaggcttcctggggtcttgcccacggggtcgtag

SEQ ID NO: 26463 - DNA, 40 bp, Artificial Sequence
  Description of Artificial Sequence: Synthetic primer
tgcagatgccaaagatgatgcctgaaaaccagtatccatc

SEQ ID NO: 26464 - DNA, 40 bp, Artificial Sequence
  Description of Artificial Sequence: Synthetic primer
caacccacggtggctcctggcttttggcagaattcacatc

SEQ ID NO: 26465 - DNA, 40 bp, Artificial Sequence
  Description of Artificial Sequence: Synthetic primer
tcatattttacatgtgcaataacattttcgttttctttcc

SEQ ID NO: 26466 - DNA, 40 bp, Artificial Sequence
  Description of Artificial Sequence: Synthetic primer
tcagctaagccttcatcataatttgttccctcagtaatag

SEQ ID NO: 26467 - DNA, 40 bp, Artificial Sequence
  Description of Artificial Sequence: Synthetic primer
cacctcctatcactgtgacccacaaaccagaagaagacac

SEQ ID NO: 26468 - DNA, 40 bp, Artificial Sequence
  Description of Artificial Sequence: Synthetic primer
agcaaaggcgagggcgatcttgacaggaaagacaacagac

SEQ ID NO: 26469 - DNA, 40 bp, Artificial Sequence
  Description of Artificial Sequence: Synthetic primer
taatagtccccatatccattgggtttttaattattttatg

SEQ ID NO: 26470 - DNA, 40 bp, Artificial Sequence
  Description of Artificial Sequence: Synthetic primer
ggttccggatttcaccaagatgctcttccagcaggtcagc

SEQ ID NO: 26471 - DNA, 40 bp, Artificial Sequence
  Description of Artificial Sequence: Synthetic primer
aatcaccaggtgaagtaaagaaactgcagaagggcagctc

SEQ ID NO: 26472 - DNA, 40 bp, Artificial Sequence
  Description of Artificial Sequence: Synthetic primer
tttccgtctttcctctctctgtccttccccgaaagtctac

SEQ ID NO: 26473 - DNA, 40 bp, Artificial Sequence
  Description of Artificial Sequence: Synthetic primer
gagctaaacagagagctggaagaaatgagggttacctatg

SEQ ID NO: 26474 - DNA, 40 bp, Artificial Sequence
  Description of Artificial Sequence: Synthetic primer
gcgggcgccgtcgtctgggacccggtgcaccggccgtttg

SEQ ID NO: 26475 - DNA, 40 bp, Artificial Sequence
  Description of Artificial Sequence: Synthetic primer
gttattcataagtactcaaaaagtagaattaacagacttc

SEQ ID NO: 26476 - DNA, 40 bp, Artificial Sequence
  Description of Artificial Sequence: Synthetic primer
aatgagctggtgcagaggggagggcctcgctcacaagcgc

SEQ ID NO: 26477 - DNA, 40 bp, Artificial Sequence
  Description of Artificial Sequence: Synthetic primer
agtgaagataaaagctgagagaagacattacatcattaac

SEQ ID NO: 26478 - DNA, 40 bp, Artificial Sequence
  Description of Artificial Sequence: Synthetic primer
gcagtccgggcaggccccgctcccgcacccgagccagagg

SEQ ID NO: 26479 - DNA, 40 bp, Artificial Sequence
  Description of Artificial Sequence: Synthetic primer
gaatccagctttgaggcttcaggtgcttgggtaccaactg

SEQ ID NO: 26480 - DNA, 40 bp, Artificial Sequence
  Description of Artificial Sequence: Synthetic primer
tagtcatatctgagcataagaccttgatgtgtgattcctg

SEQ ID NO: 26481 - DNA, 40 bp, Artificial Sequence
  Description of Artificial Sequence: Synthetic primer
cttgtaaggattgatgaccacacagaacaggcctgaatag

SEQ ID NO: 26482 - DNA, 40 bp, Artificial Sequence
  Description of Artificial Sequence: Synthetic primer
gccacacacgtcacaatgatgccaaggacattcccacttc

SEQ ID NO: 26483 - DNA, 40 bp, Artificial Sequence
  Description of Artificial Sequence: Synthetic primer
ccacgctgagccccttcccagggccctggggagggcgggg

SEQ ID NO: 26484 - DNA, 40 bp, Artificial Sequence
  Description of Artificial Sequence: Synthetic primer
ccttttcttcaacttcaacatcagatgatgcatttgattg

SEQ ID NO: 26485 - DNA, 40 bp, Artificial Sequence
  Description of Artificial Sequence: Synthetic primer
catgaactgtgacaacctttggacacttaactctttaccc

SEQ ID NO: 26486 - DNA, 40 bp, Artificial Sequence
  Description of Artificial Sequence: Synthetic primer
caagaagacggagacagacatgagtcttcacccgctcctg

SEQ ID NO: 26487 - DNA, 40 bp, Artificial Sequence
  Description of Artificial Sequence: Synthetic primer
ctttactaagtggtttaaattcttctttaaatttcacatc

SEQ ID NO: 26488 - DNA, 40 bp, Artificial Sequence
  Description of Artificial Sequence: Synthetic primer
ctctggaggaggaaacgtccagcaccgagctggagactgg

SEQ ID NO: 26489 - DNA, 40 bp, Artificial Sequence
  Description of Artificial Sequence: Synthetic primer
ccaggagagccccggctggacagtgagacagagagtgacc

SEQ ID NO: 26490 - DNA, 40 bp, Artificial Sequence
  Description of Artificial Sequence: Synthetic primer
cattaaccagaacttcccagccagcactgaccctggaaac

SEQ ID NO: 26491 - DNA, 40 bp, Artificial Sequence
  Description of Artificial Sequence: Synthetic primer
acctccctggtgtgagcccaccagcgcgcaccgtcgccac

SEQ ID NO: 26492 - DNA, 40 bp, Artificial Sequence
  Description of Artificial Sequence: Synthetic primer
caggaaccttcaaggcccaggagtctggtcagggcagcac

SEQ ID NO: 26493 - DNA, 40 bp, Artificial Sequence
  Description of Artificial Sequence: Synthetic primer
acgtgccagcggcatgacaaccctctctgcagaactttcc

SEQ ID NO: 26494 - DNA, 40 bp, Artificial Sequence
  Description of Artificial Sequence: Synthetic primer
agattcacacctgcctgtctcagaagaacggtgggcattg

SEQ ID NO: 26495 - DNA, 40 bp, Artificial Sequence
  Description of Artificial Sequence: Synthetic primer
ggctctggtaattttggaactgtgaaaaagggctactacc

SEQ ID NO: 26496 - DNA, 40 bp, Artificial Sequence
  Description of Artificial Sequence: Synthetic primer
gtccttaaaagctaattaaaaatggttttggttacataag

SEQ ID NO: 26497 - DNA, 40 bp, Artificial Sequence
  Description of Artificial Sequence: Synthetic primer
gaagaattactggctgaggcaaccaaacaagccagcaatc

SEQ ID NO: 26498 - DNA, 40 bp, Artificial Sequence
  Description of Artificial Sequence: Synthetic primer
gaaatgccagacactggcgtctcaaaagcagctttcaaag

SEQ ID NO: 26499 - DNA, 40 bp, Artificial Sequence
  Description of Artificial Sequence: Synthetic primer
ggaagttacaccaggtgcagagatccaagatggcagattc

SEQ ID NO: 26500 - DNA, 40 bp, Artificial Sequence
  Description of Artificial Sequence: Synthetic primer
ttacttttctcctgattaattgccctcgatggtgttagtg

SEQ ID NO: 26501 - DNA, 40 bp, Artificial Sequence
  Description of Artificial Sequence: Synthetic primer
gagaaaaaatttaataaagcaacaaaaattactcttattc

SEQ ID NO: 26502 - DNA, 40 bp, Artificial Sequence
  Description of Artificial Sequence: Synthetic primer
tgttcaactgagaacttggagcttcggaagaaggtagagg

SEQ ID NO: 26503 - DNA, 40 bp, Artificial Sequence
  Description of Artificial Sequence: Synthetic primer
tcactgtttcatttgatgtatttacccagtctttttatcc

SEQ ID NO: 26504 - DNA, 40 bp, Artificial Sequence
  Description of Artificial Sequence: Synthetic primer
tggttgtctaatgtgaggaaaagcctataattattcagtg

SEQ ID NO: 26505 - DNA, 40 bp, Artificial Sequence
  Description of Artificial Sequence: Synthetic primer
gatgtattcgatgtgccactgtctggactctctggctctg

SEQ ID NO: 26506 - DNA, 40 bp, Artificial Sequence
  Description of Artificial Sequence: Synthetic primer
tgaatattccatctttgattaaaaaagtgaaatagtctcc

SEQ ID NO: 26507 - DNA, 40 bp, Artificial Sequence
  Description of Artificial Sequence: Synthetic primer
agacaccttcagagtttagttttataataaaaactgtttg

SEQ ID NO: 26508 - DNA, 40 bp, Artificial Sequence
  Description of Artificial Sequence: Synthetic primer
cttttttggaatgcacgtccaagaatacggctctgattgc

SEQ ID NO: 26509 - DNA, 40 bp, Artificial Sequence
  Description of Artificial Sequence: Synthetic primer
tacatatacatttagacaaccaccatttgttaagtatttg

SEQ ID NO: 26510 - DNA, 40 bp, Artificial Sequence
  Description of Artificial Sequence: Synthetic primer
ctttccgcactgatgctctctgcatggtacatgtggtagg

SEQ ID NO: 26511 - DNA, 40 bp, Artificial Sequence
  Description of Artificial Sequence: Synthetic primer
tgtaatgatactgaaacttaatgaataaaaaaattccttg

SEQ ID NO: 26512 - DNA, 40 bp, Artificial Sequence
  Description of Artificial Sequence: Synthetic primer
cagcggaccctgtgtcagcaaataccagtaatttaacatc

SEQ ID NO: 26513 - DNA, 40 bp, Artificial Sequence
  Description of Artificial Sequence: Synthetic primer
tgctctgaaactccagagtactggcctctagagccagaac

SEQ ID NO: 26514 - DNA, 40 bp, Artificial Sequence
  Description of Artificial Sequence: Synthetic primer
ggtctgaaataattattttcctgttctattaatacatagt

SEQ ID NO: 26515 - DNA, 40 bp, Artificial Sequence
  Description of Artificial Sequence: Synthetic primer
ttatgttgtggctgattaccatcttgagcatcagatcctc

SEQ ID NO: 26516 - DNA, 40 bp, Artificial Sequence
  Description of Artificial Sequence: Synthetic primer
aaggtgtagtggaagtatctgctatgggactattgctgtg

SEQ ID NO: 26517 - DNA, 40 bp, Artificial Sequence
  Description of Artificial Sequence: Synthetic primer
agaggaaggaaaagacaatcattgcttcaagaatgctgac

SEQ ID NO: 26518 - DNA, 40 bp, Artificial Sequence
  Description of Artificial Sequence: Synthetic primer
tgcagctgcagctgcagcagcagccgctaaggcagccaag

SEQ ID NO: 26519 - DNA, 40 bp, Artificial Sequence
  Description of Artificial Sequence: Synthetic primer
tttgctgatgggttcttagagccttagcagccctggatgg

SEQ ID NO: 26520 - DNA, 40 bp, Artificial Sequence
  Description of Artificial Sequence: Synthetic primer
ccacagaggccttgaggatggtgcccttgttccagcgcac

SEQ ID NO: 26521 - DNA, 40 bp, Artificial Sequence
  Description of Artificial Sequence: Synthetic primer
ggaacaggcaaagaggtgtacacatgaaaattaagactcc

SEQ ID NO: 26522 - DNA, 40 bp, Artificial Sequence
  Description of Artificial Sequence: Synthetic primer
gctcagtgctgccaggccatcgatcctatgggccgtgctc

SEQ ID NO: 26523 - DNA, 40 bp, Artificial Sequence
  Description of Artificial Sequence: Synthetic primer
aaaccaaaagaagatgtgatgagcttaccagaaaaatgag

SEQ ID NO: 26524 - DNA, 40 bp, Artificial Sequence
  Description of Artificial Sequence: Synthetic primer
tgtggcaagaatttcctctaatgtgaaaggcaaacaaaac

SEQ ID NO: 26525 - DNA, 40 bp, Artificial Sequence
  Description of Artificial Sequence: Synthetic primer
aagtcagacaccttgatgacttggttttctcccaccaaac

SEQ ID NO: 26526 - DNA, 40 bp, Artificial Sequence
  Description of Artificial Sequence: Synthetic primer
tgtaatgtagtgaataaatgcaatttgctaagaatacaag

SEQ ID NO: 26527 - DNA, 40 bp, Artificial Sequence
  Description of Artificial Sequence: Synthetic primer
taatgaaatgaaattatcacaggatcaaattggttttcag

SEQ ID NO: 26528 - DNA, 40 bp, Artificial Sequence
  Description of Artificial Sequence: Synthetic primer
agaggccacacaccactggacacgcaactggaagacaaag

SEQ ID NO: 26529 - DNA, 40 bp, Artificial Sequence
  Description of Artificial Sequence: Synthetic primer
atactggttctgtgtttggtcaagcagccagtactggtgg

SEQ ID NO: 26530 - DNA, 40 bp, Artificial Sequence
  Description of Artificial Sequence: Synthetic primer
acataagattaggatacatttattacattgaaagttggtg

SEQ ID NO: 26531 - DNA, 40 bp, Artificial Sequence
  Description of Artificial Sequence: Synthetic primer
gtcgtcttcatcgtcctcctcctcggggatcatggagtcg

SEQ ID NO: 26532 - DNA, 40 bp, Artificial Sequence
  Description of Artificial Sequence: Synthetic primer
gcacctaaccagcttcgacttcaactacagcagcgattac

SEQ ID NO: 26533 - DNA, 40 bp, Artificial Sequence
  Description of Artificial Sequence: Synthetic primer
tgttggatttcatgtctctatggatgatgttctttgcatg

SEQ ID NO: 26534 - DNA, 40 bp, Artificial Sequence
  Description of Artificial Sequence: Synthetic primer
aaaagacctgtcaccacaacaaagagggaagtgaacagtg

SEQ ID NO: 26535 - DNA, 40 bp, Artificial Sequence
  Description of Artificial Sequence: Synthetic primer
gacggtcggactcccgcggcgggaggagcctgttcccctg

SEQ ID NO: 26536 - DNA, 40 bp, Artificial Sequence
  Description of Artificial Sequence: Synthetic primer
caaccttcacactttatgtatcaaatcagaggtgttttcc

SEQ ID NO: 26537 - DNA, 40 bp, Artificial Sequence
  Description of Artificial Sequence: Synthetic primer
gcccttttgaaggaacggcagaagaaagacaatcacaacc

SEQ ID NO: 26538 - DNA, 40 bp, Artificial Sequence
  Description of Artificial Sequence: Synthetic primer
gcagctacttgctgcacctgttgggccagttcccgagttg

SEQ ID NO: 26539 - DNA, 40 bp, Artificial Sequence
  Description of Artificial Sequence: Synthetic primer
cattgttaccaagaagtgatatggtttgcagctgtatgag

SEQ ID NO: 26540 - DNA, 40 bp, Artificial Sequence
  Description of Artificial Sequence: Synthetic primer
ttttccttgaatatatttacacaagacagtattcctcatc

SEQ ID NO: 26541 - DNA, 40 bp, Artificial Sequence
  Description of Artificial Sequence: Synthetic primer
caaggtgtgtcattaaatagctcttcatcttcatttttag

SEQ ID NO: 26542 - DNA, 40 bp, Artificial Sequence
  Description of Artificial Sequence: Synthetic primer
gcaacggaacatggctgcatcaaatattggcatctctcac

SEQ ID NO: 26543 - DNA, 40 bp, Artificial Sequence
  Description of Artificial Sequence: Synthetic primer
cagtccatctcttcctggtaccatgtccaattctgtttgc

SEQ ID NO: 26544 - DNA, 40 bp, Artificial Sequence
  Description of Artificial Sequence: Synthetic primer
gacagggaagccacgcaccattccttctgagccttgaatc

SEQ ID NO: 26545 - DNA, 40 bp, Artificial Sequence
  Description of Artificial Sequence: Synthetic primer
caccccgtgagggcagaggcatgccaccaccactccgtgg

SEQ ID NO: 26546 - DNA, 40 bp, Artificial Sequence
  Description of Artificial Sequence: Synthetic primer
tttggggaaccagcactcctcgtccagcagggccagaatg

SEQ ID NO: 26547 - DNA, 40 bp, Artificial Sequence
  Description of Artificial Sequence: Synthetic primer
tggtcaagtttttccgcatctctttcagctcatcactagc

SEQ ID NO: 26548 - DNA, 40 bp, Artificial Sequence
  Description of Artificial Sequence: Synthetic primer
aaggacactcagaagtgcagtcagtgtgaggaaggctttg

SEQ ID NO: 26549 - DNA, 40 bp, Artificial Sequence
  Description of Artificial Sequence: Synthetic primer
ctggcagatggctctgcctgcacttctttttgggactcag

SEQ ID NO: 26550 - DNA, 40 bp, Artificial Sequence
  Description of Artificial Sequence: Synthetic primer
cgctgccgaagaccaactgctcctgctggccgggctctgg

SEQ ID NO: 26551 - DNA, 40 bp, Artificial Sequence
  Description of Artificial Sequence: Synthetic primer
ggcagaggggcgagggagacccgcgggaaggggcagcaag

SEQ ID NO: 26552 - DNA, 40 bp, Artificial Sequence
  Description of Artificial Sequence: Synthetic primer
ttccaacacgccactggggcgcaacctctcgactcaccag

SEQ ID NO: 26553 - DNA, 40 bp, Artificial Sequence
  Description of Artificial Sequence: Synthetic primer
gtaactttttaaaagtttggatgtatagagggataaatag

SEQ ID NO: 26554 - DNA, 40 bp, Artificial Sequence
  Description of Artificial Sequence: Synthetic primer
gggaatctgtcaggactaaactttctgccattctgttctc

SEQ ID NO: 26555 - DNA, 40 bp, Artificial Sequence
  Description of Artificial Sequence: Synthetic primer
actaactgactctgttattgatcccttctcctgccctttc

SEQ ID NO: 26556 - DNA, 40 bp, Artificial Sequence
  Description of Artificial Sequence: Synthetic primer
aactatggaggatcaagccttgttgcaagcagtcgatcag

SEQ ID NO: 26557 - DNA, 40 bp, Artificial Sequence
  Description of Artificial Sequence: Synthetic primer
gcagctgtgtaccattcctcgcgatgctgcctactacagc

SEQ ID NO: 26558 - DNA, 40 bp, Artificial Sequence
  Description of Artificial Sequence: Synthetic primer
tgacgggacagagccagggcactcaccaggctgcaagaac

SEQ ID NO: 26559 - DNA, 40 bp, Artificial Sequence
  Description of Artificial Sequence: Synthetic primer
ggagattgatagagccttaggaatacccgaactggtcagc

SEQ ID NO: 26560 - DNA, 40 bp, Artificial Sequence
  Description of Artificial Sequence: Synthetic primer
tgctttcttggaccaaatggcagcctgattaccagtgtcg

SEQ ID NO: 26561 - DNA, 40 bp, Artificial Sequence
  Description of Artificial Sequence: Synthetic primer
tcttctccttctcctactgccaatctccctagccctttcc

SEQ ID NO: 26562 - DNA, 40 bp, Artificial Sequence
  Description of Artificial Sequence: Synthetic primer
tgaccttcttggtgttctccgtcttgccagctccagattc

SEQ ID NO: 26563 - DNA, 40 bp, Artificial Sequence
  Description of Artificial Sequence: Synthetic primer
ggcctgagacagggcggccagctgctcgtgcacggccttc

SEQ ID NO: 26564 - DNA, 40 bp, Artificial Sequence
  Description of Artificial Sequence: Synthetic primer
tacccaaaacaaagatctagccaatcaagtctctgtgtgc

SEQ ID NO: 26565 - DNA, 40 bp, Artificial Sequence
  Description of Artificial Sequence: Synthetic primer
caaggtttctgccagcccactgttgtatacgcttattgag

SEQ ID NO: 26566 - DNA, 40 bp, Artificial Sequence
  Description of Artificial Sequence: Synthetic primer
ttgtacgttctgcaaaacattttatgtatagatttagagg

SEQ ID NO: 26567 - DNA, 40 bp, Artificial Sequence
  Description of Artificial Sequence: Synthetic primer
tgagtcactacgttaaaacagcaaaacatatagtttgtcc

SEQ ID NO: 26568 - DNA, 40 bp, Artificial Sequence
  Description of Artificial Sequence: Synthetic primer
cgctttgaagatcaagatctcccagatcaagaatgacatc

SEQ ID NO: 26569 - DNA, 40 bp, Artificial Sequence
  Description of Artificial Sequence: Synthetic primer
taaaagtgtccctttataaatgatattatttccagataag

SEQ ID NO: 26570 - DNA, 40 bp, Artificial Sequence
  Description of Artificial Sequence: Synthetic primer
ggacaggtggcctggaaagatcccgcccaggtctgggagc

SEQ ID NO: 26571 - DNA, 40 bp, Artificial Sequence
  Description of Artificial Sequence: Synthetic primer
cgcctccttcatcgggatcctggacattgccggcttcgag

SEQ ID NO: 26572 - DNA, 40 bp, Artificial Sequence
  Description of Artificial Sequence: Synthetic primer
gggcgtgtgtggtatcaacatgggatgcaccatgcccaac

SEQ ID NO: 26573 - DNA, 40 bp, Artificial Sequence
  Description of Artificial Sequence: Synthetic primer
actgcgtattttcccttaaacttacctgactaaaggcatc

SEQ ID NO: 26574 - DNA, 40 bp, Artificial Sequence
  Description of Artificial Sequence: Synthetic primer
ggattcctaaaagaatgtcaactctgtgctttggattttc

SEQ ID NO: 26575 - DNA, 40 bp, Artificial Sequence
  Description of Artificial Sequence: Synthetic primer
gtttcgtagctatttaagtgatacatacctctagtttttg

SEQ ID NO: 26576 - DNA, 40 bp, Artificial Sequence
  Description of Artificial Sequence: Synthetic primer
ccagtgaatatggttccattattgctttttttgatgttcg

SEQ ID NO: 26577 - DNA, 40 bp, Artificial Sequence
  Description of Artificial Sequence: Synthetic primer
gggcccctttactaacacagggtaccatagaaatctgctc

SEQ ID NO: 26578 - DNA, 40 bp, Artificial Sequence
  Description of Artificial Sequence: Synthetic primer
gcggttgaggtctgtgaacggtgctgctgggatctgacac

SEQ ID NO: 26579 - DNA, 40 bp, Artificial Sequence
  Description of Artificial Sequence: Synthetic primer
tgatcacagcacagttcttaaacaaaagtggcatacaatc

SEQ ID NO: 26580 - DNA, 40 bp, Artificial Sequence
  Description of Artificial Sequence: Synthetic primer
ctttcttcatatctgtgtctcctgttcatttattctgaag

SEQ ID NO: 26581 - DNA, 40 bp, Artificial Sequence
  Description of Artificial Sequence: Synthetic primer
ttatgaaataatataccagactgggagaagtgacttctgc

SEQ ID NO: 26582 - DNA, 40 bp, Artificial Sequence
  Description of Artificial Sequence: Synthetic primer
tgcatgacatgtaataaacatggatgtcgacaggctttcc

SEQ ID NO: 26583 - DNA, 40 bp, Artificial Sequence
  Description of Artificial Sequence: Synthetic primer
agactacatagaggtaaataaagttgtcatgagatcctac

SEQ ID NO: 26584 - DNA, 40 bp, Artificial Sequence
  Description of Artificial Sequence: Synthetic primer
gcaagttctgcaccaaggcctaccacctgtcctgcctggg

SEQ ID NO: 26585 - DNA, 40 bp, Artificial Sequence
  Description of Artificial Sequence: Synthetic primer
agcttccagggtctttccagactagacgaataatcacttg

SEQ ID NO: 26586 - DNA, 40 bp, Artificial Sequence
  Description of Artificial Sequence: Synthetic primer
gatgcactaaaagtcaccgccaatattgtgtttggatatg

SEQ ID NO: 26587 - DNA, 40 bp, Artificial Sequence
  Description of Artificial Sequence: Synthetic primer
attgcaggttctttcttcttttcgtcaaggtctttctcag

SEQ ID NO: 26588 - DNA, 40 bp, Artificial Sequence
  Description of Artificial Sequence: Synthetic primer
agatgaaactgttttaccaaagcctcctcagatccaacac

SEQ ID NO: 26589 - DNA, 40 bp, Artificial Sequence
  Description of Artificial Sequence: Synthetic primer
ccgggacgcaaagtaataaacaaacgggtccagacagttg

SEQ ID NO: 26590 - DNA, 40 bp, Artificial Sequence
  Description of Artificial Sequence: Synthetic primer
tttattttcagtgacacgatgcttctgaacattcctcttg

SEQ ID NO: 26591 - DNA, 40 bp, Artificial Sequence
  Description of Artificial Sequence: Synthetic primer
taatacaaaaaccatcacttacataatttgtataagaaac

SEQ ID NO: 26592 - DNA, 40 bp, Artificial Sequence
  Description of Artificial Sequence: Synthetic primer
ggcgggccggcccttcccgttggtgacaggcagcgggaac

SEQ ID NO: 26593 - DNA, 40 bp, Artificial Sequence
  Description of Artificial Sequence: Synthetic primer
cctcccagtgaccccaggctttttatggctgtgagacacg

SEQ ID NO: 26594 - DNA, 40 bp, Artificial Sequence
  Description of Artificial Sequence: Synthetic primer
gggttagttcagatgtgctgagaaaagtaaatagtgtacc

SEQ ID NO: 26595 - DNA, 40 bp, Artificial Sequence
  Description of Artificial Sequence: Synthetic primer
aaagcaaagggctcaattacactttttctctctcaaactc

SEQ ID NO: 26596 - DNA, 40 bp, Artificial Sequence
  Description of Artificial Sequence: Synthetic primer
aatctcttaaacttaatattactgtgcaaaatatcaacac

SEQ ID NO: 26597 - DNA, 40 bp, Artificial Sequence
  Description of Artificial Sequence: Synthetic primer
cccacagtagctcctgttgagattgaacataattacacac

SEQ ID NO: 26598 - DNA, 40 bp, Artificial Sequence
  Description of Artificial Sequence: Synthetic primer
tcgatgctgcttacagaaggaagcaggatatagctgttcc

SEQ ID NO: 26599 - DNA, 40 bp, Artificial Sequence
  Description of Artificial Sequence: Synthetic primer
taaaattcacatttacaaaataataaagtcagttcaaacc

SEQ ID NO: 26600 - DNA, 40 bp, Artificial Sequence
  Description of Artificial Sequence: Synthetic primer
tgttttgctaatgcaaaccaatcttttgtttgagtatagg

SEQ ID NO: 26601 - DNA, 40 bp, Artificial Sequence
  Description of Artificial Sequence: Synthetic primer
cttagtaataacttgaggctcacccagatggtttgaacac

SEQ ID NO: 26602 - DNA, 40 bp, Artificial Sequence
  Description of Artificial Sequence: Synthetic primer
atgtgagaatcatggaaatgaaattaataatattaactag

SEQ ID NO: 26603 - DNA, 40 bp, Artificial Sequence
  Description of Artificial Sequence: Synthetic primer
gtggagcctgacaaggacctcaagtactgtagtgccaagg

SEQ ID NO: 26604 - DNA, 40 bp, Artificial Sequence
  Description of Artificial Sequence: Synthetic primer
gttctactgaccaacccagctaggcgcaggattagacatc

SEQ ID NO: 26605 - DNA, 40 bp, Artificial Sequence
  Description of Artificial Sequence: Synthetic primer
ttctccagtctgattttcttgttatcacagtctctttctg

SEQ ID NO: 26606 - DNA, 40 bp, Artificial Sequence
  Description of Artificial Sequence: Synthetic primer
aatgggagcaagattggcccagacaacctgccttatgtcc

SEQ ID NO: 26607 - DNA, 40 bp, Artificial Sequence
  Description of Artificial Sequence: Synthetic primer
gacagttttgtcacatcaggtgtttttagtgtcactgagc

SEQ ID NO: 26608 - DNA, 40 bp, Artificial Sequence
  Description of Artificial Sequence: Synthetic primer
gtcattttatgtttggtgggttttgaatcatttgatatac

SEQ ID NO: 26609 - DNA, 40 bp, Artificial Sequence
  Description of Artificial Sequence: Synthetic primer
tacacaaaggggttaatatggcagatatgataaagattac

SEQ ID NO: 26610 - DNA, 40 bp, Artificial Sequence
  Description of Artificial Sequence: Synthetic primer
ctgggctagagaaaggtgtccgccaacctcctcagtctcc

SEQ ID NO: 26611 - DNA, 40 bp, Artificial Sequence
  Description of Artificial Sequence: Synthetic primer
accttagagttgcctaggtccattctattctagcatatac

SEQ ID NO: 26612 - DNA, 40 bp, Artificial Sequence
  Description of Artificial Sequence: Synthetic primer
ttaaaattaaaaccggcaaggaaatacagccaatttatag

SEQ ID NO: 26613 - DNA, 40 bp, Artificial Sequence
  Description of Artificial Sequence: Synthetic primer
ggccgagatcgtggagctgcacgagatcgaggtggagacc

SEQ ID NO: 26614 - DNA, 40 bp, Artificial Sequence
  Description of Artificial Sequence: Synthetic primer
ttatgaatcagctaaaaaaatatgatgacgacatttcccc

SEQ ID NO: 26615 - DNA, 40 bp, Artificial Sequence
  Description of Artificial Sequence: Synthetic primer
catcatctctcccaccccatgaatggttctcatcacattg

SEQ ID NO: 26616 - DNA, 40 bp, Artificial Sequence
  Description of Artificial Sequence: Synthetic primer
gtggaagcgcgtgggcacgctgacgcaagacgttcagagg

SEQ ID NO: 26617 - DNA, 40 bp, Artificial Sequence
  Description of Artificial Sequence: Synthetic primer
ggcgacacacggaagactcagtcagtcccacctcccagcc

SEQ ID NO: 26618 - DNA, 40 bp, Artificial Sequence
  Description of Artificial Sequence: Synthetic primer
ggtggtctggtgcccctgacagctgagtgcctgctttacg

SEQ ID NO: 26619 - DNA, 40 bp, Artificial Sequence
  Description of Artificial Sequence: Synthetic primer
tgacagtgtgactctagatgatctggcagacttctttaag

SEQ ID NO: 26620 - DNA, 40 bp, Artificial Sequence
  Description of Artificial Sequence: Synthetic primer
tgggaacaagcaacaaagctaatccttaactatccaaaag

SEQ ID NO: 26621 - DNA, 40 bp, Artificial Sequence
  Description of Artificial Sequence: Synthetic primer
accctgttccttttttatcaggaggacttcagagccaggc

SEQ ID NO: 26622 - DNA, 40 bp, Artificial Sequence
  Description of Artificial Sequence: Synthetic primer
ggacctccagtggccggctccggaggcttggtgactccag

SEQ ID NO: 26623 - DNA, 40 bp, Artificial Sequence
  Description of Artificial Sequence: Synthetic primer
gaaggaccgctggtttttacatctgagttctcttccaacc

SEQ ID NO: 26624 - DNA, 40 bp, Artificial Sequence
  Description of Artificial Sequence: Synthetic primer
cacgcctgccctgagtgcgggaaggcctttcggcgcaagg

SEQ ID NO: 26625 - DNA, 40 bp, Artificial Sequence
  Description of Artificial Sequence: Synthetic primer
ggagtcagcgcctccgcaagcccagtcacatcttagttcc

SEQ ID NO: 26626 - DNA, 40 bp, Artificial Sequence
  Description of Artificial Sequence: Synthetic primer
actgggttccctggctgttgtgatcattctcacattcctc

SEQ ID NO: 26627 - DNA, 40 bp, Artificial Sequence
  Description of Artificial Sequence: Synthetic primer
ctacatgggtgactccgatgtctacaccgtgcaccatatg

SEQ ID NO: 26628 - DNA, 40 bp, Artificial Sequence
  Description of Artificial Sequence: Synthetic primer
gtttccctccctgcccctgccctgtccccaaagtctcctc

SEQ ID NO: 26629 - DNA, 40 bp, Artificial Sequence
  Description of Artificial Sequence: Synthetic primer
ttgccaggtaatcctccacgcacttcttcagtgactcttc

SEQ ID NO: 26630 - DNA, 40 bp, Artificial Sequence
  Description of Artificial Sequence: Synthetic primer
gggaccacacagacaggctgaggacgactttatgaccaag

SEQ ID NO: 26631 - DNA, 40 bp, Artificial Sequence
  Description of Artificial Sequence: Synthetic primer
tcctgggaagaagttatctatctctcgagtgacattcaag

SEQ ID NO: 26632 - DNA, 40 bp, Artificial Sequence
  Description of Artificial Sequence: Synthetic primer
atagttacaatttcggttctaaaagccaatgtaattcaag

SEQ ID NO: 26633 - DNA, 40 bp, Artificial Sequence
  Description of Artificial Sequence: Synthetic primer
cttctctctcccctgttctgaatggagtaaaagtctgatg

SEQ ID NO: 26634 - DNA, 40 bp, Artificial Sequence
  Description of Artificial Sequence: Synthetic primer
tttcaatgtaacagtatgacaaattcacacctcattttgg

SEQ ID NO: 26635 - DNA, 40 bp, Artificial Sequence
  Description of Artificial Sequence: Synthetic primer
tcctcaatgccatgaacgagaccaacttcttcggggtcac

SEQ ID NO: 26636 - DNA, 40 bp, Artificial Sequence
  Description of Artificial Sequence: Synthetic primer
caattccattacaataaaaatgaaagcaataacaatttgg

SEQ ID NO: 26637 - DNA, 40 bp, Artificial Sequence
  Description of Artificial Sequence: Synthetic primer
gcctggcgaagccctgggctgccctgcgggtgtgggcacc

SEQ ID NO: 26638 - DNA, 40 bp, Artificial Sequence
  Description of Artificial Sequence: Synthetic primer
cctgcggggccagggattctgtcacactgcccaccatcac

SEQ ID NO: 26639 - DNA, 40 bp, Artificial Sequence
  Description of Artificial Sequence: Synthetic primer
cggaaggtgcgggccaggctggcatggaagcccaaatcac

SEQ ID NO: 26640 - DNA, 40 bp, Artificial Sequence
  Description of Artificial Sequence: Synthetic primer
aaacagaagagaactatatccgggaccgccttgccctctc

SEQ ID NO: 26641 - DNA, 40 bp, Artificial Sequence
  Description of Artificial Sequence: Synthetic primer
tacatgatggcttttaaggccctgggagacatggtttttg

SEQ ID NO: 26642 - DNA, 40 bp, Artificial Sequence
  Description of Artificial Sequence: Synthetic primer
ctgtcttttcttgatttcggctgttttcagtattttggag

SEQ ID NO: 26643 - DNA, 40 bp, Artificial Sequence
  Description of Artificial Sequence: Synthetic primer
tcatcaaggaggccagcattgtgtaaatgatctcgtggac

SEQ ID NO: 26644 - DNA, 40 bp, Artificial Sequence
  Description of Artificial Sequence: Synthetic primer
cattttgctgaatatgtatagtttttcacaatttcattag

SEQ ID NO: 26645 - DNA, 40 bp, Artificial Sequence
  Description of Artificial Sequence: Synthetic primer
attttatccagggaatagatgtttctgagcacaactctgg

SEQ ID NO: 26646 - DNA, 40 bp, Artificial Sequence
  Description of Artificial Sequence: Synthetic primer
ggatcttcctcaaattcagagaagtctgctacgacgctac

SEQ ID NO: 26647 - DNA, 40 bp, Artificial Sequence
  Description of Artificial Sequence: Synthetic primer
gggacagcaggtgcagccactgcacacattgctcctggcc

SEQ ID NO: 26648 - DNA, 40 bp, Artificial Sequence
  Description of Artificial Sequence: Synthetic primer
ccccgggccgcaccggtcagttcagcgcgatcagcatctc

SEQ ID NO: 26649 - DNA, 40 bp, Artificial Sequence
  Description of Artificial Sequence: Synthetic primer
ctgcacttcagagcctcagggcttttcttgagctgtcctc

SEQ ID NO: 26650 - DNA, 40 bp, Artificial Sequence
  Description of Artificial Sequence: Synthetic primer
agtacaaatgagactgcttcaagcaggaagaaaccaaaag

SEQ ID NO: 26651 - DNA, 40 bp, Artificial Sequence
  Description of Artificial Sequence: Synthetic primer
ttctatttgaatcagttcattatagcaagcaattatgctg

SEQ ID NO: 26652 - DNA, 40 bp, Artificial Sequence
  Description of Artificial Sequence: Synthetic primer
ttcaccagctgagtaacgaaggccacctccaagctctcag

SEQ ID NO: 26653 - DNA, 40 bp, Artificial Sequence
  Description of Artificial Sequence: Synthetic primer
ggagaaatgcattttcagcctcatccttgattgttaaaag

SEQ ID NO: 26654 - DNA, 40 bp, Artificial Sequence
  Description of Artificial Sequence: Synthetic primer
caaaattgcttttacggtcagcccaatttgaaacagaacc

SEQ ID NO: 26655 - DNA, 40 bp, Artificial Sequence
  Description of Artificial Sequence: Synthetic primer
gcacctgctgtccctctccgtggtctgctgtattttcatc

SEQ ID NO: 26656 - DNA, 40 bp, Artificial Sequence
  Description of Artificial Sequence: Synthetic primer
agacagctctatagcagtctggtgaagttccatgcccatc

SEQ ID NO: 26657 - DNA, 40 bp, Artificial Sequence
  Description of Artificial Sequence: Synthetic primer
gatgaccgagccagccccgtccacctcctcgccggcgtcg

SEQ ID NO: 26658 - DNA, 40 bp, Artificial Sequence
  Description of Artificial Sequence: Synthetic primer
cctcgtcaaggttaaggggcaggttcaaaagtgatcatac

SEQ ID NO: 26659 - DNA, 40 bp, Artificial Sequence
  Description of Artificial Sequence: Synthetic primer
atggcgcctgaggccttgtttgaccgagtctacactcacc

SEQ ID NO: 26660 - DNA, 40 bp, Artificial Sequence
  Description of Artificial Sequence: Synthetic primer
ggcagctgctgacccgcgtcgaccagaaccagacttgctg

SEQ ID NO: 26661 - DNA, 40 bp, Artificial Sequence
  Description of Artificial Sequence: Synthetic primer
cagtaagaccatttgatgtgttctttcatggtcttctttg

SEQ ID NO: 26662 - DNA, 40 bp, Artificial Sequence
  Description of Artificial Sequence: Synthetic primer
ttctgctggtagcaagcaagatacctggatagaaaagcag

SEQ ID NO: 26663 - DNA, 40 bp, Artificial Sequence
  Description of Artificial Sequence: Synthetic primer
actttttcttgctcctctagtgctaaaaacacagctgctc

SEQ ID NO: 26664 - DNA, 40 bp, Artificial Sequence
  Description of Artificial Sequence: Synthetic primer
ctgatagaagctacagtaatagcactaaccaaattacagc

SEQ ID NO: 26665 - DNA, 40 bp, Artificial Sequence
  Description of Artificial Sequence: Synthetic primer
aatggccaggccttttgcactagccaacactttccagttg

SEQ ID NO: 26666 - DNA, 40 bp, Artificial Sequence
  Description of Artificial Sequence: Synthetic primer
atgggatccatctgttttgtaaacaataaagcgtctgagg

SEQ ID NO: 26667 - DNA, 40 bp, Artificial Sequence
  Description of Artificial Sequence: Synthetic primer
atggctaaggaaacccgtgatggtcgagtttggggaggag

SEQ ID NO: 26668 - DNA, 40 bp, Artificial Sequence
  Description of Artificial Sequence: Synthetic primer
ctcatcttgtccagaactctgtcaaatgaagaacactttc

SEQ ID NO: 26669 - DNA, 40 bp, Artificial Sequence
  Description of Artificial Sequence: Synthetic primer
ttgacacattaaaaggtactccagtatttcacttttctcg

SEQ ID NO: 26670 - DNA, 40 bp, Artificial Sequence
  Description of Artificial Sequence: Synthetic primer
tacagtcatttgggaccatcttggaacactgcttatgaac

SEQ ID NO: 26671 - DNA, 40 bp, Artificial Sequence
  Description of Artificial Sequence: Synthetic primer
acgtggtgggtgcatgacagactgtcggtgaatgctgcag

SEQ ID NO: 26672 - DNA, 40 bp, Artificial Sequence
  Description of Artificial Sequence: Synthetic primer
aaattaatatatatgaaatattcctttttgatgacaccac

SEQ ID NO: 26673 - DNA, 40 bp, Artificial Sequence
  Description of Artificial Sequence: Synthetic primer
tattataggaagcactttcataaacaactgtaacaaatcg

SEQ ID NO: 26674 - DNA, 40 bp, Artificial Sequence
  Description of Artificial Sequence: Synthetic primer
gactcaatttcaactctaactttaactttgcattggttgg

SEQ ID NO: 26675 - DNA, 40 bp, Artificial Sequence
  Description of Artificial Sequence: Synthetic primer
aaactatcagaggaaactgttggcgtacagccttacaaac

SEQ ID NO: 26676 - DNA, 40 bp, Artificial Sequence
  Description of Artificial Sequence: Synthetic primer
cagctggaagaacttgatgtcactccactcgaccccatcg

SEQ ID NO: 26677 - DNA, 40 bp, Artificial Sequence
  Description of Artificial Sequence: Synthetic primer
gcactgccccagacggcgccgccttgactcctccatcacc

SEQ ID NO: 26678 - DNA, 40 bp, Artificial Sequence
  Description of Artificial Sequence: Synthetic primer
ttgttgggagatctgcttttcaacatttacctgaactaag

SEQ ID NO: 26679 - DNA, 40 bp, Artificial Sequence
  Description of Artificial Sequence: Synthetic primer
gtgctgacagcgcgagagagcgcggccctcaggagcaagg

SEQ ID NO: 26680 - DNA, 40 bp, Artificial Sequence
  Description of Artificial Sequence: Synthetic primer
ggccctcagctgcttctaaaaggtggtagaactcttcagg

SEQ ID NO: 26681 - DNA, 40 bp, Artificial Sequence
  Description of Artificial Sequence: Synthetic primer
gcatggactccaaggattccattcactgacctcacagtgc

SEQ ID NO: 26682 - DNA, 40 bp, Artificial Sequence
  Description of Artificial Sequence: Synthetic primer
ctcatcattttcaggatattcctgccaacccatagctttc

SEQ ID NO: 26683 - DNA, 40 bp, Artificial Sequence
  Description of Artificial Sequence: Synthetic primer
taaagctactaaatgtatattctatgtctttggcctttac

SEQ ID NO: 26684 - DNA, 40 bp, Artificial Sequence
  Description of Artificial Sequence: Synthetic primer
ttcctccagatgagggtagaaattcagattcttctttttc

SEQ ID NO: 26685 - DNA, 40 bp, Artificial Sequence
  Description of Artificial Sequence: Synthetic primer
aaatctacttggattaaaaaccaagatgacagcttgactg

SEQ ID NO: 26686 - DNA, 40 bp, Artificial Sequence
  Description of Artificial Sequence: Synthetic primer
agtcccacacttgtggcattttctaatgcgggcagcagtc

SEQ ID NO: 26687 - DNA, 40 bp, Artificial Sequence
  Description of Artificial Sequence: Synthetic primer
tttcattatggcattttgtctataaatcaggcacgacctc

SEQ ID NO: 26688 - DNA, 40 bp, Artificial Sequence
  Description of Artificial Sequence: Synthetic primer
gatggtcagcagggtcccaccgtccaacgggccactcagg

SEQ ID NO: 26689 - DNA, 40 bp, Artificial Sequence
  Description of Artificial Sequence: Synthetic primer
ggcttcttgtttggctctctcggtgttggctactttgcag

SEQ ID NO: 26690 - DNA, 40 bp, Artificial Sequence
  Description of Artificial Sequence: Synthetic primer
atgaatttcgcaagccaaactagtgatcttctgagtaatg

SEQ ID NO: 26691 - DNA, 40 bp, Artificial Sequence
  Description of Artificial Sequence: Synthetic primer
ggactctccaggtccgccagggagaagttgggccctgatg

SEQ ID NO: 26692 - DNA, 40 bp, Artificial Sequence
  Description of Artificial Sequence: Synthetic primer
tagctggcctgtgaaactggctacaagtgactggatatag

SEQ ID NO: 26693 - DNA, 40 bp, Artificial Sequence
  Description of Artificial Sequence: Synthetic primer
acgctatactgcagtcttcagcttgtagtcgaggggtgac

SEQ ID NO: 26694 - DNA, 40 bp, Artificial Sequence
  Description of Artificial Sequence: Synthetic primer
ctgctccagacgtcgtttccctgataggtagagcagatcc

SEQ ID NO: 26695 - DNA, 40 bp, Artificial Sequence
  Description of Artificial Sequence: Synthetic primer
actacatcaatagcaatagctttatagcagctccggttac

SEQ ID NO: 26696 - DNA, 40 bp, Artificial Sequence
  Description of Artificial Sequence: Synthetic primer
aaactagggaaaaagggtatgtgtatattgtaaactatgg

SEQ ID NO: 26697 - DNA, 40 bp, Artificial Sequence
  Description of Artificial Sequence: Synthetic primer
tttcccaagtgtgatgcattgttcttcagatgttgaaaag

SEQ ID NO: 26698 - DNA, 40 bp, Artificial Sequence
  Description of Artificial Sequence: Synthetic primer
agccaccttcactggcctcggcatggaagagttgcagttg

SEQ ID NO: 26699 - DNA, 40 bp, Artificial Sequence
  Description of Artificial Sequence: Synthetic primer
gataaatccattggtttctttataattttatagtagtttg

SEQ ID NO: 26700 - DNA, 40 bp, Artificial Sequence
  Description of Artificial Sequence: Synthetic primer
cctcctccagctgcagggccctctgaatctgctccgagag

SEQ ID NO: 26701 - DNA, 40 bp, Artificial Sequence
  Description of Artificial Sequence: Synthetic primer
taaaaaagaaggtcataaaccactcgggcagcaaacaagg

SEQ ID NO: 26702 - DNA, 40 bp, Artificial Sequence
  Description of Artificial Sequence: Synthetic primer
tttttttgatgttaacagaaaccaatcttagcaccttttc

SEQ ID NO: 26703 - DNA, 40 bp, Artificial Sequence
  Description of Artificial Sequence: Synthetic primer
tgtgtgtgcgcgcgcacgcagtttgctagagcagctaatg

SEQ ID NO: 26704 - DNA, 40 bp, Artificial Sequence
  Description of Artificial Sequence: Synthetic primer
gggtgcggggcaacctggcaaagttgcccaagtcctccac

SEQ ID NO: 26705 - DNA, 40 bp, Artificial Sequence
  Description of Artificial Sequence: Synthetic primer
gaggctgccaatctccgtctgggagctggactgcgacatc

SEQ ID NO: 26706 - DNA, 40 bp, Artificial Sequence
  Description of Artificial Sequence: Synthetic primer
tgattcttaaggagaaagtgaatcattggtagatatcctg

SEQ ID NO: 26707 - DNA, 40 bp, Artificial Sequence
  Description of Artificial Sequence: Synthetic primer
attctgtgggatcatgatctgaatcctgaaagagaaatag

SEQ ID NO: 26708 - DNA, 40 bp, Artificial Sequence
  Description of Artificial Sequence: Synthetic primer
accagggtgggcggcaccgcgtggccgcgccgcgggttcg

SEQ ID NO: 26709 - DNA, 40 bp, Artificial Sequence
  Description of Artificial Sequence: Synthetic primer
acttcagaaagctacaggctttgcataaagagacattttc

SEQ ID NO: 26710 - DNA, 40 bp, Artificial Sequence
  Description of Artificial Sequence: Synthetic primer
aatacactttctcttgcctgtttatgtctcaaatctaatg

SEQ ID NO: 26711 - DNA, 40 bp, Artificial Sequence
  Description of Artificial Sequence: Synthetic primer
tgcttacagaagatttctcattcagacataatttgtgaac

SEQ ID NO: 26712 - DNA, 40 bp, Artificial Sequence
  Description of Artificial Sequence: Synthetic primer
agattttcttttttggggtaaagtcatgagaaaacctctc

SEQ ID NO: 26713 - DNA, 40 bp, Artificial Sequence
  Description of Artificial Sequence: Synthetic primer
agctcctgaaggagcaccagggcatcttcaccttcctctg

SEQ ID NO: 26714 - DNA, 40 bp, Artificial Sequence
  Description of Artificial Sequence: Synthetic primer
tgagttctgggcaggccaaaggccttgaaaaataatgttg

SEQ ID NO: 26715 - DNA, 40 bp, Artificial Sequence
  Description of Artificial Sequence: Synthetic primer
aaaaaataatctacaaaaatcgtttacaattgattttagc

SEQ ID NO: 26716 - DNA, 40 bp, Artificial Sequence
  Description of Artificial Sequence: Synthetic primer
tctcttgatgtagaacctatctatacattcagagcccata

SEQ ID NO: 26717 - DNA, 40 bp, Artificial Sequence
  Description of Artificial Sequence: Synthetic primer
taacattactagtgagtttcaacttctagccctgggctcg

SEQ ID NO: 26718 - DNA, 40 bp, Artificial Sequence
  Description of Artificial Sequence: Synthetic primer
ttttcctagtcagtgaactgttccctggcaaaatcctagg

SEQ ID NO: 26719 - DNA, 40 bp, Artificial Sequence
  Description of Artificial Sequence: Synthetic primer
gtgaaggccaccatgctgggccggaccaacatcagtgatg

SEQ ID NO: 26720 - DNA, 40 bp, Artificial Sequence
  Description of Artificial Sequence: Synthetic primer
cccaaattttctgctctaacatgggtcccacggacctatc

SEQ ID NO: 26721 - DNA, 40 bp, Artificial Sequence
  Description of Artificial Sequence: Synthetic primer
tctaatcagcactgaattcagagggtttgactttttcatc

SEQ ID NO: 26722 - DNA, 40 bp, Artificial Sequence
  Description of Artificial Sequence: Synthetic primer
cgatgttgtggagacccaagacatcaacatttgccctcag

SEQ ID NO: 26723 - DNA, 40 bp, Artificial Sequence
  Description of Artificial Sequence: Synthetic primer
tttgtaaacaatctaattaaatggcatcagcactttaacc

SEQ ID NO: 26724 - DNA, 40 bp, Artificial Sequence
  Description of Artificial Sequence: Synthetic primer
gtgaagcacctttgaacatttcacgtgatactttgtgttc

SEQ ID NO: 26725 - DNA, 40 bp, Artificial Sequence
  Description of Artificial Sequence: Synthetic primer
gcgtctgcggccagcgctggtcccgcagacgccgagatgg

SEQ ID NO: 26726 - DNA, 40 bp, Artificial Sequence
  Description of Artificial Sequence: Synthetic primer
gcaatagagagacaagtgagggaattagacctttggtatc

SEQ ID NO: 26727 - DNA, 40 bp, Artificial Sequence
  Description of Artificial Sequence: Synthetic primer
gcaaatgaaatttaccgaaggaaagacctttcagtatttg

SEQ ID NO: 26728 - DNA, 40 bp, Artificial Sequence
  Description of Artificial Sequence: Synthetic primer
ggctggccttcgtacggggaggacgaagcggggcgaagag

SEQ ID NO: 26729 - DNA, 40 bp, Artificial Sequence
  Description of Artificial Sequence: Synthetic primer
gtggccgggcccagggccctcacaatttcactaccttgtc

SEQ ID NO: 26730 - DNA, 40 bp, Artificial Sequence
  Description of Artificial Sequence: Synthetic primer
ccatgtgatcctggataagtttttcccggcggataatcac

SEQ ID NO: 26731 - DNA, 40 bp, Artificial Sequence
  Description of Artificial Sequence: Synthetic primer
ctttctttgtctcaaactgagtttttctaagtgaactttg

SEQ ID NO: 26732 - DNA, 40 bp, Artificial Sequence
  Description of Artificial Sequence: Synthetic primer
agtatttcttcttacagcaaacactgaggtgatacaggac

SEQ ID NO: 26733 - DNA, 40 bp, Artificial Sequence
  Description of Artificial Sequence: Synthetic primer
ttatggaatacatcggcagccaaaacgcctcccggggaag

SEQ ID NO: 26734 - DNA, 40 bp, Artificial Sequence
  Description of Artificial Sequence: Synthetic primer
ttgtttagcccaaaaccaagtcaagtgaaaaaggaggaag

SEQ ID NO: 26735 - DNA, 40 bp, Artificial Sequence
  Description of Artificial Sequence: Synthetic primer
ctgatgagaaactctcttcctcttcctcagaataattgtc

SEQ ID NO: 26736 - DNA, 40 bp, Artificial Sequence
  Description of Artificial Sequence: Synthetic primer
agtccttggtgcctttgctgatgatccggggtttactgtc

SEQ ID NO: 26737 - DNA, 40 bp, Artificial Sequence
  Description of Artificial Sequence: Synthetic primer
gcaaatgagagctccatgtccttctcatgggcctcaatgc

SEQ ID NO: 26738 - DNA, 40 bp, Artificial Sequence
  Description of Artificial Sequence: Synthetic primer
ttacagctaaatccctctgtgaggaagtcagttcttcatc

SEQ ID NO: 26739 - DNA, 40 bp, Artificial Sequence
  Description of Artificial Sequence: Synthetic primer
gggagggtgttgggtgtcgtccttttcaaaagtgttttgg

SEQ ID NO: 26740 - DNA, 40 bp, Artificial Sequence
  Description of Artificial Sequence: Synthetic primer
tgcattggcaaaactacctcttcagtgtttttaacttttg

SEQ ID NO: 26741 - DNA, 40 bp, Artificial Sequence
  Description of Artificial Sequence: Synthetic primer
tcaagtatgtgtttggcctccatctgagcagccactctgg

SEQ ID NO: 26742 - DNA, 40 bp, Artificial Sequence
  Description of Artificial Sequence: Synthetic primer
tttgatacctgcagtattactaatactgcttaatttcttg

SEQ ID NO: 26743 - DNA, 40 bp, Artificial Sequence
  Description of Artificial Sequence: Synthetic primer
tggttacccatgtgttggtgcataaatgccttaaccgaac

SEQ ID NO: 26744 - DNA, 40 bp, Artificial Sequence
  Description of Artificial Sequence: Synthetic primer
aaatctcattgtaaatatatttgatttcttgtagaaattg

SEQ ID NO: 26745 - DNA, 40 bp, Artificial Sequence
  Description of Artificial Sequence: Synthetic primer
caacagctcactgtgtgtggtgtgctatcaggttgaaatc

SEQ ID NO: 26746 - DNA, 40 bp, Artificial Sequence
  Description of Artificial Sequence: Synthetic primer
acagaagatgtaactatcagtgctgttatgttacgtgagg

SEQ ID NO: 26747 - DNA, 40 bp, Artificial Sequence
  Description of Artificial Sequence: Synthetic primer
tccggaaagtgaagaagacccggaggaaactaacctcaac

SEQ ID NO: 26748 - DNA, 40 bp, Artificial Sequence
  Description of Artificial Sequence: Synthetic primer
aaccttttgaagattctgactccgagaggccaatgccaag

SEQ ID NO: 26749 - DNA, 40 bp, Artificial Sequence
  Description of Artificial Sequence: Synthetic primer
gggcttcgggcgccgcgagcacgtgctgcgccaccagcgc

SEQ ID NO: 26750 - DNA, 40 bp, Artificial Sequence
  Description of Artificial Sequence: Synthetic primer
aggtgcgtcttcaggttttcgaggcgtgagtatgacttcc

SEQ ID NO: 26751 - DNA, 40 bp, Artificial Sequence
  Description of Artificial Sequence: Synthetic primer
acacagcctcgaagatctcctccagcccaaaactacactc

SEQ ID NO: 26752 - DNA, 40 bp, Artificial Sequence
  Description of Artificial Sequence: Synthetic primer
tgataacttttccacttgagaactactttatgttttactg

SEQ ID NO: 26753 - DNA, 40 bp, Artificial Sequence
  Description of Artificial Sequence: Synthetic primer
tccttggaaacagtcacagaagctttgttggagatcatgg

SEQ ID NO: 26754 - DNA, 40 bp, Artificial Sequence
  Description of Artificial Sequence: Synthetic primer
cccactctggaggcgagctggagagcttggctcgtggaag

SEQ ID NO: 26755 - DNA, 40 bp, Artificial Sequence
  Description of Artificial Sequence: Synthetic primer
tcggactggagctctgggctgcggcgcacgccttgcccgc

SEQ ID NO: 26756 - DNA, 40 bp, Artificial Sequence
  Description of Artificial Sequence: Synthetic primer
gagttcaaggctggccctgctagcacctccccccttccac

SEQ ID NO: 26757 - DNA, 40 bp, Artificial Sequence
  Description of Artificial Sequence: Synthetic primer
gtgcaggagctagctcagcgcgccgcggtggtgatcgagg

SEQ ID NO: 26758 - DNA, 40 bp, Artificial Sequence
  Description of Artificial Sequence: Synthetic primer
aaagtaagtaccactcaggccaacaagccaacgacaaagc

SEQ ID NO: 26759 - DNA, 40 bp, Artificial Sequence
  Description of Artificial Sequence: Synthetic primer
ccggaagatcatcttctcctacgtggtggtcttccttgtc

SEQ ID NO: 26760 - DNA, 40 bp, Artificial Sequence
  Description of Artificial Sequence: Synthetic primer
gcgcacccggcccaaggccgccggactcccgggcgccgcg

SEQ ID NO: 26761 - DNA, 40 bp, Artificial Sequence
  Description of Artificial Sequence: Synthetic primer
ctacatcttcccagattttggccagaaaaagacggagagg

SEQ ID NO: 26762 - DNA, 40 bp, Artificial Sequence
  Description of Artificial Sequence: Synthetic primer
ctggatacctccccagttccaccgaggatggtgtctgcac

SEQ ID NO: 26763 - DNA, 40 bp, Artificial Sequence
  Description of Artificial Sequence: Synthetic primer
gctgttttaaacattaatagcagcctttctctctttatac

SEQ ID NO: 26764 - DNA, 40 bp, Artificial Sequence
  Description of Artificial Sequence: Synthetic primer
aacatactggggttataatactatttctctcataaacttg

SEQ ID NO: 26765 - DNA, 40 bp, Artificial Sequence
  Description of Artificial Sequence: Synthetic primer
gctcccactgttgatttatctgatagtgttttccattgtc

SEQ ID NO: 26766 - DNA, 40 bp, Artificial Sequence
  Description of Artificial Sequence: Synthetic primer
cagcctgcaggtaaataggctagaaaagccaaggccaaag

SEQ ID NO: 26767 - DNA, 40 bp, Artificial Sequence
  Description of Artificial Sequence: Synthetic primer
aagtaattattttccttcatcaagctagttaccactcaag

SEQ ID NO: 26768 - DNA, 40 bp, Artificial Sequence
  Description of Artificial Sequence: Synthetic primer
gcagcaagctgagggtctttgtttgggtttattattacgg

SEQ ID NO: 26769 - DNA, 40 bp, Artificial Sequence
  Description of Artificial Sequence: Synthetic primer
cccgcgcgggatcgtgcgtcgtcccgccgcgtccctgaag

SEQ ID NO: 26770 - DNA, 40 bp, Artificial Sequence
  Description of Artificial Sequence: Synthetic primer
ataaaataaccctgccaagatggctcttctcttctatttc

SEQ ID NO: 26771 - DNA, 40 bp, Artificial Sequence
  Description of Artificial Sequence: Synthetic primer
tctggacccgcatgaatcgactatgcagtgacaggttgtg

SEQ ID NO: 26772 - DNA, 40 bp, Artificial Sequence
  Description of Artificial Sequence: Synthetic primer
ctctggggatcccagggaagtaaggtgccaacctgcaatg

SEQ ID NO: 26773 - DNA, 40 bp, Artificial Sequence
  Description of Artificial Sequence: Synthetic primer
aatctgctggtcatttgccatctggatttttaactgaatg

SEQ ID NO: 26774 - DNA, 40 bp, Artificial Sequence
  Description of Artificial Sequence: Synthetic primer
aagccagtctggggaggggagtcaggcagtccaggatctc

SEQ ID NO: 26775 - DNA, 40 bp, Artificial Sequence
  Description of Artificial Sequence: Synthetic primer
taaaatcatctatatatacttccccagaaaatcatcagtg

SEQ ID NO: 26776 - DNA, 40 bp, Artificial Sequence
  Description of Artificial Sequence: Synthetic primer
actgctgatcttggacttgatattggtgcccagggagaac

SEQ ID NO: 26777 - DNA, 40 bp, Artificial Sequence
  Description of Artificial Sequence: Synthetic primer
tttcattgaatgagaattgctttcgtatagttcacattag

SEQ ID NO: 26778 - DNA, 40 bp, Artificial Sequence
  Description of Artificial Sequence: Synthetic primer
ccgcccctccgctgctggcgccgcacccggcacgcactgg

SEQ ID NO: 26779 - DNA, 40 bp, Artificial Sequence
  Description of Artificial Sequence: Synthetic primer
gctcactaagcttgataaaggctgaactgtgtaatgtagg

SEQ ID NO: 26780 - DNA, 40 bp, Artificial Sequence
  Description of Artificial Sequence: Synthetic primer
ccccatgttgtaatgctgcacttcctgttttataatgaac

SEQ ID NO: 26781 - DNA, 40 bp, Artificial Sequence
  Description of Artificial Sequence: Synthetic primer
tttaaataccctatacctgagttacaaatcacctaagcac

SEQ ID NO: 26782 - DNA, 40 bp, Artificial Sequence
  Description of Artificial Sequence: Synthetic primer
ttgttgtaaatcttctcaattgggacaccccacttcttgc

SEQ ID NO: 26783 - DNA, 40 bp, Artificial Sequence
  Description of Artificial Sequence: Synthetic primer
ctcccatgggtggctggagttgctgctgtggttgctgctg

SEQ ID NO: 26784 - DNA, 40 bp, Artificial Sequence
  Description of Artificial Sequence: Synthetic primer
cagggctctccccagatgggaggacaaacaggattgagag

SEQ ID NO: 26785 - DNA, 40 bp, Artificial Sequence
  Description of Artificial Sequence: Synthetic primer
gcaggaagaagatggtacgccgtgtcgtctgcatcctggt

SEQ ID NO: 26786 - DNA, 40 bp, Artificial Sequence
  Description of Artificial Sequence: Synthetic primer
actggcacaggtgctgccggatcatctctaccctctccac

SEQ ID NO: 26787 - DNA, 40 bp, Artificial Sequence
  Description of Artificial Sequence: Synthetic primer
aattctttgcagcttaatgtgatatatgactatcttgaac

SEQ ID NO: 26788 - DNA, 40 bp, Artificial Sequence
  Description of Artificial Sequence: Synthetic primer
ttttactttcaaaacattttctattataagtcagaaggaa

SEQ ID NO: 26789 - DNA, 40 bp, Artificial Sequence
  Description of Artificial Sequence: Synthetic primer
cgggataaccaactctccttctctcttctttggtgcttcc

SEQ ID NO: 26790 - DNA, 40 bp, Artificial Sequence
  Description of Artificial Sequence: Synthetic primer
gttggtttggctctattctttttcggttaccacttcttgc

SEQ ID NO: 26791 - DNA, 40 bp, Artificial Sequence
  Description of Artificial Sequence: Synthetic primer
aacagcttttcctttttctcttactgttttctctacagtc

SEQ ID NO: 26792 - DNA, 40 bp, Artificial Sequence
  Description of Artificial Sequence: Synthetic primer
gccggcccgcctccctggccggggcgcagttcggaggttc

SEQ ID NO: 26793 - DNA, 40 bp, Artificial Sequence
  Description of Artificial Sequence: Synthetic primer
cgccggcgagcccggggaggaggcgccctatctggtgaag

SEQ ID NO: 26794 - DNA, 40 bp, Artificial Sequence
  Description of Artificial Sequence: Synthetic primer
tggcagtaaatagctgattcgacgttttgcctgaagactg

SEQ ID NO: 26795 - DNA, 40 bp, Artificial Sequence
  Description of Artificial Sequence: Synthetic primer
aagaccaggagcttgtcactagtctgatatttcattcagg

SEQ ID NO: 26796 - DNA, 40 bp, Artificial Sequence
  Description of Artificial Sequence: Synthetic primer
attgccagtgaattaagaccagggctagagtcaacagtcc

SEQ ID NO: 26797 - DNA, 40 bp, Artificial Sequence
  Description of Artificial Sequence: Synthetic primer
ataattacaggaaaataagtgcgaccacatatatcttaac

SEQ ID NO: 26798 - DNA, 40 bp, Artificial Sequence
  Description of Artificial Sequence: Synthetic primer
cagccacttcctgcgtattaatggccttattgatgctgac

SEQ ID NO: 26799 - DNA, 40 bp, Artificial Sequence
  Description of Artificial Sequence: Synthetic primer
cagcttgccttagatgctgtaaattcaggaaaagctgaac

SEQ ID NO: 26800 - DNA, 40 bp, Artificial Sequence
  Description of Artificial Sequence: Synthetic primer
ctgaaacatcttctgtgggaatatattttatgtcctgttg

SEQ ID NO: 26801 - DNA, 40 bp, Artificial Sequence
  Description of Artificial Sequence: Synthetic primer
cgcctcctcggagtccttggggacggagcagcgcgtcgtg

SEQ ID NO: 26802 - DNA, 40 bp, Artificial Sequence
  Description of Artificial Sequence: Synthetic primer
agagagatgtacgatctcatgaatctgtgctggacatacg

SEQ ID NO: 26803 - DNA, 40 bp, Artificial Sequence
  Description of Artificial Sequence: Synthetic primer
ttataataatcaagattaaatgtaaataatcagggcaatc

SEQ ID NO: 26804 - DNA, 40 bp, Artificial Sequence
  Description of Artificial Sequence: Synthetic primer
ggaagggagaagacagaaaaagacaaaagaacctatctcc

SEQ ID NO: 26805 - DNA, 40 bp, Artificial Sequence
  Description of Artificial Sequence: Synthetic primer
agtcactaacattagtaacttcttgtatgttatattatgg

SEQ ID NO: 26806 - DNA, 40 bp, Artificial Sequence
  Description of Artificial Sequence: Synthetic primer
tgcaccacatgtgacaagaggctagaggaagggcagagac

SEQ ID NO: 26807 - DNA, 40 bp, Artificial Sequence
  Description of Artificial Sequence: Synthetic primer
ccaggctgaaggatcactgaggaaggggaagtgggcaaag

SEQ ID NO: 26808 - DNA, 40 bp, Artificial Sequence
  Description of Artificial Sequence: Synthetic primer
gaggggagtttcctgtagtgctgtttcattagaggatttc

SEQ ID NO: 26809 - DNA, 40 bp, Artificial Sequence
  Description of Artificial Sequence: Synthetic primer
ccggctggcctccacacacgtctaccagattatgaatcac

SEQ ID NO: 26810 - DNA, 40 bp, Artificial Sequence
  Description of Artificial Sequence: Synthetic primer
tggacgggcggcggatcggcaaaggcgaggctctgtgctc

SEQ ID NO: 26811 - DNA, 40 bp, Artificial Sequence
  Description of Artificial Sequence: Synthetic primer
catctctaggccagtcttcttctcctgggagtccaatcac

SEQ ID NO: 26812 - DNA, 40 bp, Artificial Sequence
  Description of Artificial Sequence: Synthetic primer
atagagactatttgcaattctgttcactcaatagatcctg

SEQ ID NO: 26813 - DNA, 40 bp, Artificial Sequence
  Description of Artificial Sequence: Synthetic primer
ccatgcgcctctcccggtccctcaggtctttctcctccag

SEQ ID NO: 26814 - DNA, 40 bp, Artificial Sequence
  Description of Artificial Sequence: Synthetic primer
ctgggcgatgcgggcctccagacgccgcttctcctctaac

SEQ ID NO: 26815 - DNA, 40 bp, Artificial Sequence
  Description of Artificial Sequence: Synthetic primer
gatgatgaagatgatcgggaaacacaaaaacatcatcaac

SEQ ID NO: 26816 - DNA, 40 bp, Artificial Sequence
  Description of Artificial Sequence: Synthetic primer
caactggaagaagggaaatgttggcagtggctcaggactc

SEQ ID NO: 26817 - DNA, 40 bp, Artificial Sequence
  Description of Artificial Sequence: Synthetic primer
accccagctatggataaaacgtccatggttaatatgagtc

SEQ ID NO: 26818 - DNA, 40 bp, Artificial Sequence
  Description of Artificial Sequence: Synthetic primer
agctcaccttcttcagcaggaccacttccatgggcactcg

SEQ ID NO: 26819 - DNA, 40 bp, Artificial Sequence
  Description of Artificial Sequence: Synthetic primer
caacatttagcaatcaacagaaccccttccctatcctacc

SEQ ID NO: 26820 - DNA, 40 bp, Artificial Sequence
  Description of Artificial Sequence: Synthetic primer
ttcttttcagacaccaagcttaggactggagtgtttcctc

SEQ ID NO: 26821 - DNA, 40 bp, Artificial Sequence
  Description of Artificial Sequence: Synthetic primer
catggtctttgagtacatgaagcatggggacctcaacaag

SEQ ID NO: 26822 - DNA, 40 bp, Artificial Sequence
  Description of Artificial Sequence: Synthetic primer
ctcagacaccaggtccgacaggtccttgtcagtggcatcg

SEQ ID NO: 26823 - DNA, 40 bp, Artificial Sequence
  Description of Artificial Sequence: Synthetic primer
gctgcccaaacagacttggtgcggtgctggctgccacttg

SEQ ID NO: 26824 - DNA, 40 bp, Artificial Sequence
  Description of Artificial Sequence: Synthetic primer
ccagggcctgaacctgggccttcactctctctgcctcctc

SEQ ID NO: 26825 - DNA, 40 bp, Artificial Sequence
  Description of Artificial Sequence: Synthetic primer
ccctgacggtcccacttctctccaatcttgtagttcacac

SEQ ID NO: 26826 - DNA, 40 bp, Artificial Sequence
  Description of Artificial Sequence: Synthetic primer
aagtggtctgtgaatggagatacccgtgtaggcctttttg

SEQ ID NO: 26827 - DNA, 40 bp, Artificial Sequence
  Description of Artificial Sequence: Synthetic primer
cggggctctatgggtttctgaatgtcatcgtccactcagc

SEQ ID NO: 26828 - DNA, 40 bp, Artificial Sequence
  Description of Artificial Sequence: Synthetic primer
gggcaagctagcattgaaacaatgatgttaaatctggtca

SEQ ID NO: 26829 - DNA, 40 bp, Artificial Sequence
  Description of Artificial Sequence: Synthetic primer
cggaccacagtctgcactgcgttcacagagacgttgatgg

SEQ ID NO: 26830 - DNA, 40 bp, Artificial Sequence
  Description of Artificial Sequence: Synthetic primer
cttgacactaatgctgttgtcctgaacatcggtcacttgc

SEQ ID NO: 26831 - DNA, 40 bp, Artificial Sequence
  Description of Artificial Sequence: Synthetic primer
tggctccaacaatgtagccattgacatcaaagttgatgcg

SEQ ID NO: 26832 - DNA, 40 bp, Artificial Sequence
  Description of Artificial Sequence: Synthetic primer
ggatccattaaatgtcatcttccaccttaaattctggttc

SEQ ID NO: 26833 - DNA, 40 bp, Artificial Sequence
  Description of Artificial Sequence: Synthetic primer
tttggaaccagccagatttaatcagttcacaattattcag

SEQ ID NO: 26834 - DNA, 40 bp, Artificial Sequence
  Description of Artificial Sequence: Synthetic primer
cgcagcccaagaaggtccggaaggtcccgccgggtcttcc

SEQ ID NO: 26835 - DNA, 40 bp, Artificial Sequence
  Description of Artificial Sequence: Synthetic primer
tgggtggtgagggggcgccattcaaggctgtaggagaatg

SEQ ID NO: 26836 - DNA, 40 bp, Artificial Sequence
  Description of Artificial Sequence: Synthetic primer
gttcaaacactaaagttagtttggtttctctgtctgttcg

SEQ ID NO: 26837 - DNA, 40 bp, Artificial Sequence
  Description of Artificial Sequence: Synthetic primer
tcccgtccatgaaacccttgggaatggagtttggagtcag

SEQ ID NO: 26838 - DNA, 40 bp, Artificial Sequence
  Description of Artificial Sequence: Synthetic primer
aggcaaaccaggaggcacctttctgactttttttgcttgc

SEQ ID NO: 26839 - DNA, 40 bp, Artificial Sequence
  Description of Artificial Sequence: Synthetic primer
gggtcacattctcgccctggatctctgtgaaacacttctc

SEQ ID NO: 26840 - DNA, 40 bp, Artificial Sequence
  Description of Artificial Sequence: Synthetic primer
tctgggcagttcagcaagcctttctcattttctccatcag

SEQ ID NO: 26841 - DNA, 40 bp, Artificial Sequence
  Description of Artificial Sequence: Synthetic primer
tcgaacacctcggtgcgcgtcttgcactcggcgatcatgg

SEQ ID NO: 26842 - DNA, 40 bp, Artificial Sequence
  Description of Artificial Sequence: Synthetic primer
gcctggaccggtcacggccaccccacgccccagtcgaaag

SEQ ID NO: 26843 - DNA, 40 bp, Artificial Sequence
  Description of Artificial Sequence: Synthetic primer
cagggattttagataaaaagccaccacctagaatcgaaag

SEQ ID NO: 26844 - DNA, 40 bp, Artificial Sequence
  Description of Artificial Sequence: Synthetic primer
atgaaaaacagatgtacccatctattcaagcaaaaatatg

SEQ ID NO: 26845 - DNA, 40 bp, Artificial Sequence
  Description of Artificial Sequence: Synthetic primer
atccacatcagtgaatgccagtcctttagggcgatcaatg

SEQ ID NO: 26846 - DNA, 40 bp, Artificial Sequence
  Description of Artificial Sequence: Synthetic primer
ctgtttaaagaaaagtgcacgaactaggaaagaaaataag

SEQ ID NO: 26847 - DNA, 40 bp, Artificial Sequence
  Description of Artificial Sequence: Synthetic primer
acatctcacgggatatgtttagagggagatcctccgagtc

SEQ ID NO: 26848 - DNA, 40 bp, Artificial Sequence
  Description of Artificial Sequence: Synthetic primer
atctctctcagttgattatattggatacactggaaaaatg

SEQ ID NO: 26849 - DNA, 40 bp, Artificial Sequence
  Description of Artificial Sequence: Synthetic primer
ggggccggggcaggccgcgcaagcagcctccggtgagtcc

SEQ ID NO: 26850 - DNA, 40 bp, Artificial Sequence
  Description of Artificial Sequence: Synthetic primer
tcaagtatttctcttttaaagcttcaagtgggtcagttag

SEQ ID NO: 26851 - DNA, 40 bp, Artificial Sequence
  Description of Artificial Sequence: Synthetic primer
acgtgcaatccctgaactgacaaaactgctaaatgacgag

SEQ ID NO: 26852 - DNA, 40 bp, Artificial Sequence
  Description of Artificial Sequence: Synthetic primer
ttagaagacggtgttggtgtgattatcccaaaattaaagc

SEQ ID NO: 26853 - DNA, 40 bp, Artificial Sequence
  Description of Artificial Sequence: Synthetic primer
gcaacttgccactccctactgaataaagctacagtaaaag

SEQ ID NO: 26854 - DNA, 40 bp, Artificial Sequence
  Description of Artificial Sequence: Synthetic primer
agaaggagatggtgtggaattgatggaagccaaatcacag

SEQ ID NO: 26855 - DNA, 40 bp, Artificial Sequence
  Description of Artificial Sequence: Synthetic primer
gggtactttttaagtattgaagtgtatacaaggctctcac

SEQ ID NO: 26856 - DNA, 40 bp, Artificial Sequence
  Description of Artificial Sequence: Synthetic primer
tggagaatggcataactgaatcttgtgccacatcttattc

SEQ ID NO: 26857 - DNA, 40 bp, Artificial Sequence
  Description of Artificial Sequence: Synthetic primer
agcccgtgcgcgaagtggccttccgcgactacggcctgga

SEQ ID NO: 26858 - DNA, 40 bp, Artificial Sequence
  Description of Artificial Sequence: Synthetic primer
tgaccacaaagcacaatttacatgtgtccactcattttgg

SEQ ID NO: 26859 - DNA, 40 bp, Artificial Sequence
  Description of Artificial Sequence: Synthetic primer
agcaaggaattgggtgtggtggccaggaaacgcaggttgg

SEQ ID NO: 26860 - DNA, 40 bp, Artificial Sequence
  Description of Artificial Sequence: Synthetic primer
tgcccacggcgtggctgcggagcacgtggatggcctcgtc

SEQ ID NO: 26861 - DNA, 40 bp, Artificial Sequence
  Description of Artificial Sequence: Synthetic primer
gggcacaccccgtgccagtgtacgccttctccatcaaagg

SEQ ID NO: 26862 - DNA, 40 bp, Artificial Sequence
  Description of Artificial Sequence: Synthetic primer
gccttcgggactgggttcacccccaggtctgcggcagttg

SEQ ID NO: 26863 - DNA, 40 bp, Artificial Sequence
  Description of Artificial Sequence: Synthetic primer
ggtgaatggctgtttgcaagttgtacatgtgtagctgctg

SEQ ID NO: 26864 - DNA, 40 bp, Artificial Sequence
  Description of Artificial Sequence: Synthetic primer
agcaagtaacaataactattactactggcttgctggaaaa

SEQ ID NO: 26865 - DNA, 40 bp, Artificial Sequence
  Description of Artificial Sequence: Synthetic primer
ccgccagaaggctgaatttattcctcagttggagtcagag

SEQ ID NO: 26866 - DNA, 40 bp, Artificial Sequence
  Description of Artificial Sequence: Synthetic primer
gatatgcgaatgctgtcctctcccaagtattcactctatg

SEQ ID NO: 26867 - DNA, 40 bp, Artificial Sequence
  Description of Artificial Sequence: Synthetic primer
cgccgccgccgcggagtagccgtagaccgggtggccgtag

SEQ ID NO: 26868 - DNA, 40 bp, Artificial Sequence
  Description of Artificial Sequence: Synthetic primer
ctttctcacgctatgattaccagagacagccagatagtgg

SEQ ID NO: 26869 - DNA, 40 bp, Artificial Sequence
  Description of Artificial Sequence: Synthetic primer
aaattaaactaaagatgttttaagctaaagcctgaatttg

SEQ ID NO: 26870 - DNA, 40 bp, Artificial Sequence
  Description of Artificial Sequence: Synthetic primer
cctgttggagtccaatgtcaagagtggcagaaggagcaac

SEQ ID NO: 26871 - DNA, 40 bp, Artificial Sequence
  Description of Artificial Sequence: Synthetic primer
ccatcttgcggagccacggggagagcgcgccagaaatgag

SEQ ID NO: 26872 - DNA, 40 bp, Artificial Sequence
  Description of Artificial Sequence: Synthetic primer
tggctcccccagctttgtgattggacctgcaactttaccc

SEQ ID NO: 26873 - DNA, 40 bp, Artificial Sequence
  Description of Artificial Sequence: Synthetic primer
agaggcctatgcctcccccagccacaccaaaggcgagcag

SEQ ID NO: 26874 - DNA, 40 bp, Artificial Sequence
  Description of Artificial Sequence: Synthetic primer
gtgaggctggagcgcggcctgcctgagtctcctcctgtgg

SEQ ID NO: 26875 - DNA, 40 bp, Artificial Sequence
  Description of Artificial Sequence: Synthetic primer
gacacaaagcataaagaagctgtaactattctttctcagc

SEQ ID NO: 26876 - DNA, 40 bp, Artificial Sequence
  Description of Artificial Sequence: Synthetic primer
tgggtcttggctgaagttcacgattgagcccaggaagtag

SEQ ID NO: 26877 - DNA, 40 bp, Artificial Sequence
  Description of Artificial Sequence: Synthetic primer
agagggttcctgctttgaatttattaatctgcttggttag

SEQ ID NO: 26878 - DNA, 40 bp, Artificial Sequence
  Description of Artificial Sequence: Synthetic primer
ccctggcctcctgggagcgggcggcgatggctggggtgtg

SEQ ID NO: 26879 - DNA, 40 bp, Artificial Sequence
  Description of Artificial Sequence: Synthetic primer
cagttcacttacgcgatatctggcttgagataatgaaagg

SEQ ID NO: 26880 - DNA, 40 bp, Artificial Sequence
  Description of Artificial Sequence: Synthetic primer
ttttcagaggaaaacttctgagtaatgatgaagtaacaat

SEQ ID NO: 26881 - DNA, 40 bp, Artificial Sequence
  Description of Artificial Sequence: Synthetic primer
tttataatactgttttaaaatgtgaggcaataagaattac

SEQ ID NO: 26882 - DNA, 40 bp, Artificial Sequence
  Description of Artificial Sequence: Synthetic primer
acaatgaatcctcttccatgttaacacaaatagcacacag

SEQ ID NO: 26883 - DNA, 40 bp, Artificial Sequence
  Description of Artificial Sequence: Synthetic primer
atcctgcccgagcttggggtgcggtttgaagaccacgaag

SEQ ID NO: 26884 - DNA, 40 bp, Artificial Sequence
  Description of Artificial Sequence: Synthetic primer
gcgccgccgcgtcttcccggtctcctttcccggccgcaca

SEQ ID NO: 26885 - DNA, 40 bp, Artificial Sequence
  Description of Artificial Sequence: Synthetic primer
gcacgggaccacaggacagagtattaatagaaaagaaaac

SEQ ID NO: 26886 - DNA, 40 bp, Artificial Sequence
  Description of Artificial Sequence: Synthetic primer
ttcaggagctcctcgtgcatctgcaggccaatctccttgc

SEQ ID NO: 26887 - DNA, 40 bp, Artificial Sequence
  Description of Artificial Sequence: Synthetic primer
ggagaagctgggcaccatggctggcctctcaggaccactc

SEQ ID NO: 26888 - DNA, 40 bp, Artificial Sequence
  Description of Artificial Sequence: Synthetic primer
gtgggcttcagagaggaggcgatgaccccatacatacaag

SEQ ID NO: 26889 - DNA, 40 bp, Artificial Sequence
  Description of Artificial Sequence: Synthetic primer
atttatagatgtcaggaaacattcagtgaaaaacttgtag

SEQ ID NO: 26890 - DNA, 40 bp, Artificial Sequence
  Description of Artificial Sequence: Synthetic primer
tttagttttgtttcaagttgaaatacctttcttgtgtttt

SEQ ID NO: 26891 - DNA, 40 bp, Artificial Sequence
  Description of Artificial Sequence: Synthetic primer
tctgccaaaatatcatagccaatctgggactgcatgacac

SEQ ID NO: 26892 - DNA, 40 bp, Artificial Sequence
  Description of Artificial Sequence: Synthetic primer
agctgccagggacggagatgaggaaggcgtggaggttctg

SEQ ID NO: 26893 - DNA, 40 bp, Artificial Sequence
  Description of Artificial Sequence: Synthetic primer
tgtatcccatgccctgcacgaagtacttgaaggcctcagc

SEQ ID NO: 26894 - DNA, 40 bp, Artificial Sequence
  Description of Artificial Sequence: Synthetic primer
agtctgcagaagtccagcagcctgggcaatctgaagaaag

SEQ ID NO: 26895 - DNA, 40 bp, Artificial Sequence
  Description of Artificial Sequence: Synthetic primer
agtaatttcatttctcaaaatagaattttcctgttgaagc

SEQ ID NO: 26896 - DNA, 40 bp, Artificial Sequence
  Description of Artificial Sequence: Synthetic primer
ggcactgaaaattataatagtgcctgtgtggaagggaaaa

SEQ ID NO: 26897 - DNA, 40 bp, Artificial Sequence
  Description of Artificial Sequence: Synthetic primer
caggggcctgatcttggccgtccattggcctcacatacgc

SEQ ID NO: 26898 - DNA, 40 bp, Artificial Sequence
  Description of Artificial Sequence: Synthetic primer
tcgaattcactctggagagaagccctacaaatgcgaaacc

SEQ ID NO: 26899 - DNA, 40 bp, Artificial Sequence
  Description of Artificial Sequence: Synthetic primer
ggcatcgtcggcaaaggaggaaaggagttacagggttcag

SEQ ID NO: 26900 - DNA, 40 bp, Artificial Sequence
  Description of Artificial Sequence: Synthetic primer
tatttcttcaacacagctgttggtttctccagatctactc

SEQ ID NO: 26901 - DNA, 40 bp, Artificial Sequence
  Description of Artificial Sequence: Synthetic primer
ccatgatgaactgtgctgttaggattcttatttgctactc

SEQ ID NO: 26902 - DNA, 40 bp, Artificial Sequence
  Description of Artificial Sequence: Synthetic primer
gagcccaacatgacaactcagaaaggacctgaaaacttac

SEQ ID NO: 26903 - DNA, 40 bp, Artificial Sequence
  Description of Artificial Sequence: Synthetic primer
aaattgctttcagaagaatgtatatcatcgggaaaagttc

SEQ ID NO: 26904 - DNA, 40 bp, Artificial Sequence
  Description of Artificial Sequence: Synthetic primer
atgataatattctcttcagagattctgcaaatgcgacaag

SEQ ID NO: 26905 - DNA, 40 bp, Artificial Sequence
  Description of Artificial Sequence: Synthetic primer
gacccctcaccacccccactggtgagacagtttactttgc

SEQ ID NO: 26906 - DNA, 40 bp, Artificial Sequence
  Description of Artificial Sequence: Synthetic primer
cctcagatagctggctcctggaatggatggttgacacaag

SEQ ID NO: 26907 - DNA, 40 bp, Artificial Sequence
  Description of Artificial Sequence: Synthetic primer
cagcagagacgctggagctacaagttgcactgtcacacac

SEQ ID NO: 26908 - DNA, 40 bp, Artificial Sequence
  Description of Artificial Sequence: Synthetic primer
tcaattgatgggagagtagttgagccaaaacgtgctgtag

SEQ ID NO: 26909 - DNA, 40 bp, Artificial Sequence
  Description of Artificial Sequence: Synthetic primer
caggcgcttcatggactcgccggcatccagcaatgcgtca

SEQ ID NO: 26910 - DNA, 40 bp, Artificial Sequence
  Description of Artificial Sequence: Synthetic primer
gcagctctgcggggtctctgcatctagtagggccgatctc

SEQ ID NO: 26911 - DNA, 40 bp, Artificial Sequence
  Description of Artificial Sequence: Synthetic primer
tcagcgatcagggtcctcttctcctcctctgtcaggacca

SEQ ID NO: 26912 - DNA, 40 bp, Artificial Sequence
  Description of Artificial Sequence: Synthetic primer
gctgggccttccgcttccccatgggcgagttccggctctg

SEQ ID NO: 26913 - DNA, 40 bp, Artificial Sequence
  Description of Artificial Sequence: Synthetic primer
gggctgggctctcagcgcggggcggccctagcggggctca

SEQ ID NO: 26914 - DNA, 40 bp, Artificial Sequence
  Description of Artificial Sequence: Synthetic primer
aagcttctagattttaccgctcttcagaaaacatttaagg

SEQ ID NO: 26915 - DNA, 40 bp, Artificial Sequence
  Description of Artificial Sequence: Synthetic primer
cgtcctcgtcggactcctcggactgcaggtcctccaccat

SEQ ID NO: 26916 - DNA, 40 bp, Artificial Sequence
  Description of Artificial Sequence: Synthetic primer
ctttttttctatgcgcaaaactgcctgaaagcaactacag

SEQ ID NO: 26917 - DNA, 40 bp, Artificial Sequence
  Description of Artificial Sequence: Synthetic primer
ttgtggaatcacagatctagtgctaaaagactgtccaaag

SEQ ID NO: 26918 - DNA, 40 bp, Artificial Sequence
  Description of Artificial Sequence: Synthetic primer
aagtttgagaagtggagctgatggaggtgacgggccaatg

SEQ ID NO: 26919 - DNA, 40 bp, Artificial Sequence
  Description of Artificial Sequence: Synthetic primer
gaagctgaatcccttaatgatgaagagttagaggaaaaag

SEQ ID NO: 26920 - DNA, 40 bp, Artificial Sequence
  Description of Artificial Sequence: Synthetic primer
tggttttattctccttctcactcatgatctcttccattag

SEQ ID NO: 26921 - DNA, 40 bp, Artificial Sequence
  Description of Artificial Sequence: Synthetic primer
ggcctctccaagcccggccgcccgcaccagtgggtgtttc

SEQ ID NO: 26922 - DNA, 40 bp, Artificial Sequence
  Description of Artificial Sequence: Synthetic primer
cctcttcctcctcaggtgccaatggcctcttctcctcctc

SEQ ID NO: 26923 - DNA, 40 bp, Artificial Sequence
  Description of Artificial Sequence: Synthetic primer
cgcccggccccaggagcccaccatgcctccccccgagacc

SEQ ID NO: 26924 - DNA, 40 bp, Artificial Sequence
  Description of Artificial Sequence: Synthetic primer
ggtgactcattcaaatcatctggaggtggtgaagctaatc

SEQ ID NO: 26925 - DNA, 40 bp, Artificial Sequence
  Description of Artificial Sequence: Synthetic primer
acaattttcccaaaattttaacttaccaaggttagtgctc

SEQ ID NO: 26926 - DNA, 40 bp, Artificial Sequence
  Description of Artificial Sequence: Synthetic primer
ccatttcactaacttttaacctcaaatcattgatctcctg

SEQ ID NO: 26927 - DNA, 40 bp, Artificial Sequence
  Description of Artificial Sequence: Synthetic primer
tgctggccttggaggtgtcctagggggtgccgggcagttc

SEQ ID NO: 26928 - DNA, 40 bp, Artificial Sequence
  Description of Artificial Sequence: Synthetic primer
atttaaatcacttatgaccaagttattaaccttatgaatc

SEQ ID NO: 26929 - DNA, 40 bp, Artificial Sequence
  Description of Artificial Sequence: Synthetic primer
ctgcactaggctggcccaggagcccatgttcttgattttc

SEQ ID NO: 26930 - DNA, 40 bp, Artificial Sequence
  Description of Artificial Sequence: Synthetic primer
gcattcccgaaatcccaaactccgatagtccatagcaagg

SEQ ID NO: 26931 - DNA, 40 bp, Artificial Sequence
  Description of Artificial Sequence: Synthetic primer
agatgcagatgagctctttgcagatgccaggaatgaacac

SEQ ID NO: 26932 - DNA, 40 bp, Artificial Sequence
  Description of Artificial Sequence: Synthetic primer
tcctggcaggaatttggtgctttatcctactgatgcttac

SEQ ID NO: 26933 - DNA, 40 bp, Artificial Sequence
  Description of Artificial Sequence: Synthetic primer
gagggcacgctggggcccacactcacacgcgcacaaaaag

SEQ ID NO: 26934 - DNA, 40 bp, Artificial Sequence
  Description of Artificial Sequence: Synthetic primer
aaattgagtaaatttaatggtccccattctctccccattc

SEQ ID NO: 26935 - DNA, 40 bp, Artificial Sequence
  Description of Artificial Sequence: Synthetic primer
cctgcacggtttctaaattgaagtagatgatctgaatctg

SEQ ID NO: 26936 - DNA, 40 bp, Artificial Sequence
  Description of Artificial Sequence: Synthetic primer
gttgctgggccgtgatggctgctggggtagtgcgttgtgc

SEQ ID NO: 26937 - DNA, 40 bp, Artificial Sequence
  Description of Artificial Sequence: Synthetic primer
ggccagttccttcagtccaatgtcttagtttccagagaag

SEQ ID NO: 26938 - DNA, 40 bp, Artificial Sequence
  Description of Artificial Sequence: Synthetic primer
agggtctgaaggatgtaggagcaaaggtgactggcttcag

SEQ ID NO: 26939 - DNA, 40 bp, Artificial Sequence
  Description of Artificial Sequence: Synthetic primer
cttcgagcgccgcggacgcgtcatcgagtgtgacgtggtg

SEQ ID NO: 26940 - DNA, 40 bp, Artificial Sequence
  Description of Artificial Sequence: Synthetic primer
cacgctgagcggtcctcgctccaagcccgcctccccaaag

SEQ ID NO: 26941 - DNA, 40 bp, Artificial Sequence
  Description of Artificial Sequence: Synthetic primer
cagatcgcggagctcaagatgcagctggccaagaaagagg

SEQ ID NO: 26942 - DNA, 40 bp, Artificial Sequence
  Description of Artificial Sequence: Synthetic primer
tccagttaatgaagaagggaattcagattcaaatttgttg

SEQ ID NO: 26943 - DNA, 40 bp, Artificial Sequence; identical to SEQ ID NO: 22115
  Description of Artificial Sequence: Synthetic primer

SEQ ID NO: 26944 - DNA, 40 bp, Artificial Sequence
  Description of Artificial Sequence: Synthetic primer
aatgacaaaaagtttgtcattaaacccatcgacaagaagg

SEQ ID NO: 26945 - DNA, 40 bp, Artificial Sequence
  Description of Artificial Sequence: Synthetic primer
cgaagatacggtcctcattttctcgtattttgttgatttc

SEQ ID NO: 26946 - DNA, 40 bp, Artificial Sequence
  Description of Artificial Sequence: Synthetic primer
caagaactttctgatcgagcccttcgtcccccacagtcag

SEQ ID NO: 26947 - DNA, 40 bp, Artificial Sequence
  Description of Artificial Sequence: Synthetic primer
tgtcaaaggggttgctgttctctctttcctcaatgagttc

SEQ ID NO: 26948 - DNA, 40 bp, Artificial Sequence
  Description of Artificial Sequence: Synthetic primer
tcgctcttctgattattcttcagggcaatgacataaattg

SEQ ID NO: 26949 - DNA, 40 bp, Artificial Sequence
  Description of Artificial Sequence: Synthetic primer
aagaggagtccacgtcttcaaaacgaaaacgaaaagaagc

SEQ ID NO: 26950 - DNA, 40 bp, Artificial Sequence
  Description of Artificial Sequence: Synthetic primer
agcccactcaaaccaggcactgtgtctcaacaagccttac

SEQ ID NO: 26951 - DNA, 40 bp, Artificial Sequence
  Description of Artificial Sequence: Synthetic primer
gccatgaccaactcaaagcagagcattgcaaagaagatcg

SEQ ID NO: 26952 - DNA, 40 bp, Artificial Sequence
  Description of Artificial Sequence: Synthetic primer
ccccaagcacccggagagcatcaaggcccccgtccacctg

SEQ ID NO: 26953 - DNA, 40 bp, Artificial Sequence
  Description of Artificial Sequence: Synthetic primer
taaggtgatgagagcctgcagacattctgcctagatttac

SEQ ID NO: 26954 - DNA, 40 bp, Artificial Sequence
  Description of Artificial Sequence: Synthetic primer
gcatttgttttggttttacaaaaaggaaacttgacagagg

SEQ ID NO: 26955 - DNA, 40 bp, Artificial Sequence
  Description of Artificial Sequence: Synthetic primer
ctttaaattaaccctttccggtccatatgccactaagcag

SEQ ID NO: 26956 - DNA, 40 bp, Artificial Sequence
  Description of Artificial Sequence: Synthetic primer
ttgagatcttgtgaatatatgcctgtcagtgtcttcttta

SEQ ID NO: 26957 - DNA, 40 bp, Artificial Sequence
  Description of Artificial Sequence: Synthetic primer
cctttccagcagtgagccccatgggctgtgttacatagag

SEQ ID NO: 26958 - DNA, 40 bp, Artificial Sequence
  Description of Artificial Sequence: Synthetic primer
gcctgggccttgctccggacctgggcgatctcctcgtttg

SEQ ID NO: 26959 - DNA, 40 bp, Artificial Sequence
  Description of Artificial Sequence: Synthetic primer
tagaaatgtctgaaatctgggagatcactgccccttcatc

SEQ ID NO: 26960 - DNA, 40 bp, Artificial Sequence
  Description of Artificial Sequence: Synthetic primer
aactttacgtaaatgtgggtgctgttgtgatgaggaaatc

SEQ ID NO: 26961 - DNA, 40 bp, Artificial Sequence
  Description of Artificial Sequence: Synthetic primer
cttatcattttcaggagtcttaatgtaaattcaggttttc

SEQ ID NO: 26962 - DNA, 40 bp, Artificial Sequence
  Description of Artificial Sequence: Synthetic primer
tctagccttgagctccatctcatgttgcagcctcagcttc

SEQ ID NO: 26963 - DNA, 40 bp, Artificial Sequence
  Description of Artificial Sequence: Synthetic primer
tctcctattgacccagaaagcgattccttcactgatacac

SEQ ID NO: 26964 - DNA, 40 bp, Artificial Sequence
  Description of Artificial Sequence: Synthetic primer
accacctcgggaggacagcaaagctccaagagtgacagag

SEQ ID NO: 26965 - DNA, 40 bp, Artificial Sequence
  Description of Artificial Sequence: Synthetic primer
tgtcaaaagacaatccaagtctgttggttaggtaaatctc

SEQ ID NO: 26966 - DNA, 40 bp, Artificial Sequence
  Description of Artificial Sequence: Synthetic primer
cctgggtatgtccacgcgcaataaggaggggcgaaaggac

SEQ ID NO: 26967 - DNA, 40 bp, Artificial Sequence
  Description of Artificial Sequence: Synthetic primer
ccgccacgttcagcatgctggggaacaccgtgacgggctc

SEQ ID NO: 26968 - DNA, 40 bp, Artificial Sequence
  Description of Artificial Sequence: Synthetic primer
gccaggaaatccatgagcctggacatggggcaaccttctc

SEQ ID NO: 26969 - DNA, 40 bp, Artificial Sequence
  Description of Artificial Sequence: Synthetic primer
cagcgggtagacataaaatactgtcctcttgtaatccttc

SEQ ID NO: 26970 - DNA, 40 bp, Artificial Sequence
  Description of Artificial Sequence: Synthetic primer
gtatattcaggcgaaagccacttttctgctggttagatgc

SEQ ID NO: 26971 - DNA, 40 bp, Artificial Sequence
  Description of Artificial Sequence: Synthetic primer
gtcgatgcaggacaagtccattgcagaacacaaacttatc

SEQ ID NO: 26972 - DNA, 40 bp, Artificial Sequence
  Description of Artificial Sequence: Synthetic primer
gctctggagtaagtttactattcccttccttgctactcag

SEQ ID NO: 26973 - DNA, 40 bp, Artificial Sequence
  Description of Artificial Sequence: Synthetic primer
ttctcactctggactacagtgaggctgaatttatcatgtc

SEQ ID NO: 26974 - DNA, 40 bp, Artificial Sequence
  Description of Artificial Sequence: Synthetic primer
gcagagagaacggttgcaaaactggaaaagacaattgatg

SEQ ID NO: 26975 - DNA, 40 bp, Artificial Sequence
  Description of Artificial Sequence: Synthetic primer
acccctgttctggcttgacttgcacttgtccataatgttc

SEQ ID NO: 26976 - DNA, 40 bp, Artificial Sequence
  Description of Artificial Sequence: Synthetic primer
cgttgcgctcccgcagcgccatcagcctccggtgtagctc

SEQ ID NO: 26977 - DNA, 40 bp, Artificial Sequence
  Description of Artificial Sequence: Synthetic primer
atacatagcattaaagaaacatttttgagaagtacaaatc

SEQ ID NO: 26978 - DNA, 40 bp, Artificial Sequence
  Description of Artificial Sequence: Synthetic primer
caggcgctcaggcctctgcagccgcggctcacccgcatgg

SEQ ID NO: 26979 - DNA, 40 bp, Artificial Sequence
  Description of Artificial Sequence: Synthetic primer
agttgacaagctaaaaaccaaatttatatctgcttggaac

SEQ ID NO: 26980 - DNA, 40 bp, Artificial Sequence
  Description of Artificial Sequence: Synthetic primer
gagttctgtcttggtcctgtccattcttaattctcattcc

SEQ ID NO: 26981 - DNA, 40 bp, Artificial Sequence
  Description of Artificial Sequence: Synthetic primer
aggcaggagcaagttgcggaactcaaaaagaagaagtgag

SEQ ID NO: 26982 - DNA, 40 bp, Artificial Sequence
  Description of Artificial Sequence: Synthetic primer
ctcccttcccctcagcagcgagaagcggggcgcagcagac

SEQ ID NO: 26983 - DNA, 40 bp, Artificial Sequence
  Description of Artificial Sequence: Synthetic primer
gtagtcattcttaatgtactaagtgtcacggggagcacag

SEQ ID NO: 26984 - DNA, 40 bp, Artificial Sequence
  Description of Artificial Sequence: Synthetic primer
tctcctcttcatcactgcttagcttaaggtcatcttccag

SEQ ID NO: 26985 - DNA, 40 bp, Artificial Sequence
  Description of Artificial Sequence: Synthetic primer
agtgcttgccatcgtagtagagcctgaagtttctggtttg

SEQ ID NO: 26986 - DNA, 40 bp, Artificial Sequence
  Description of Artificial Sequence: Synthetic primer
agatggataaaatacttaagaagatcgataactgcctcac

SEQ ID NO: 26987 - DNA, 40 bp, Artificial Sequence
  Description of Artificial Sequence: Synthetic primer
acttgcaaattgttagttacacacttcaaatcatgaggag

SEQ ID NO: 26988 - DNA, 40 bp, Artificial Sequence
  Description of Artificial Sequence: Synthetic primer
cccccaacatttcaggaaatcccgtcaactcagagacatc

SEQ ID NO: 26989 - DNA, 40 bp, Artificial Sequence
  Description of Artificial Sequence: Synthetic primer
agctctagagtttgtgagggagctggatcctgttctggag

SEQ ID NO: 26990 - DNA, 40 bp, Artificial Sequence
  Description of Artificial Sequence: Synthetic primer
ggccaaagtcagtaaaaaggagctcaactccaaccacgac

SEQ ID NO: 26991 - DNA, 40 bp, Artificial Sequence
  Description of Artificial Sequence: Synthetic primer
gggcaaaggctctgggctccaaggccacatcatcgagaac

SEQ ID NO: 26992 - DNA, 40 bp, Artificial Sequence
  Description of Artificial Sequence: Synthetic primer
tttaaacatataaacaatccggtttgatgcgtgaaaacta

SEQ ID NO: 26993 - DNA, 40 bp, Artificial Sequence
  Description of Artificial Sequence: Synthetic primer
attggtaatgcctgctgtcctgtattcttggagcctcttg

SEQ ID NO: 26994 - DNA, 40 bp, Artificial Sequence
  Description of Artificial Sequence: Synthetic primer
gtcttccagcagcgggtgcagagtcttcaggggcattttg

SEQ ID NO: 26995 - DNA, 40 bp, Artificial Sequence
  Description of Artificial Sequence: Synthetic primer
attctgggctttgggttccaattctagccctgcttttctc

SEQ ID NO: 26996 - DNA, 40 bp, Artificial Sequence
  Description of Artificial Sequence: Synthetic primer
acaacgtgaggccttccggccagaggaggtaactgagaac

SEQ ID NO: 26997 - DNA, 40 bp, Artificial Sequence
  Description of Artificial Sequence: Synthetic primer
gcaataaagaaaccgtgcaagaaactcagtgaataagaag

SEQ ID NO: 26998 - DNA, 40 bp, Artificial Sequence
  Description of Artificial Sequence: Synthetic primer
accagagttcaatgcgcctcagaaaactccataaactatc

SEQ ID NO: 26999 - DNA, 40 bp, Artificial Sequence
  Description of Artificial Sequence: Synthetic primer
attccatgtcacctgcacggtttctaaattgaagtagatg

SEQ ID NO: 27000 - DNA, 40 bp, Artificial Sequence
  Description of Artificial Sequence: Synthetic primer
tacaagaaaaatctggtagaacagcacattcaggacattg

SEQ ID NO: 27001 - DNA, 40 bp, Artificial Sequence
  Description of Artificial Sequence: Synthetic primer
gaagctggagaaggagaagctggagcaaaacccggaggag

SEQ ID NO: 27002 - DNA, 40 bp, Artificial Sequence
  Description of Artificial Sequence: Synthetic primer
tgtaaaaaagtctttcttcacaatttttgactttccagtg

SEQ ID NO: 27003 - DNA, 40 bp, Artificial Sequence
  Description of Artificial Sequence: Synthetic primer
aaaagggaaaaacaaccaaaataatttaagtaaatgacag

SEQ ID NO: 27004 - DNA, 40 bp, Artificial Sequence
  Description of Artificial Sequence: Synthetic primer
gacatcataaggagaattcctttgaatgtaaggactgtgg

SEQ ID NO: 27005 - DNA, 40 bp, Artificial Sequence
  Description of Artificial Sequence: Synthetic primer
ggtgcagttatccccgtacttacagtcctgcttgttaatc

SEQ ID NO: 27006 - DNA, 40 bp, Artificial Sequence
  Description of Artificial Sequence: Synthetic primer
tggcaaaatgaaaccagcatacccagattcttctactttg

SEQ ID NO: 27007 - DNA, 40 bp, Artificial Sequence
  Description of Artificial Sequence: Synthetic primer
aaatttattcaaccaaccaaacaatataaaaatcaaaatg

SEQ ID NO: 27008 - DNA, 40 bp, Artificial Sequence
  Description of Artificial Sequence: Synthetic primer
gaattgagtgatttcctgcaggctatggaacacactgaag

SEQ ID NO: 27009 - DNA, 40 bp, Artificial Sequence
  Description of Artificial Sequence: Synthetic primer
aaaaagaggggtatctgtttctcttacatttaataacctg

SEQ ID NO: 27010 - DNA, 40 bp, Artificial Sequence
  Description of Artificial Sequence: Synthetic primer
agccaaagagctgtctgaatattccaattatcaagaaaca

SEQ ID NO: 27011 - DNA, 40 bp, Artificial Sequence
  Description of Artificial Sequence: Synthetic primer
ggtccccagggtcaaggtgatgcacagtgctttcttagtc

SEQ ID NO: 27012 - DNA, 40 bp, Artificial Sequence
  Description of Artificial Sequence: Synthetic primer
gctgcatgcctggaccaccccagccctcccactacaccag

SEQ ID NO: 27013 - DNA, 40 bp, Artificial Sequence
  Description of Artificial Sequence: Synthetic primer
acgacgacaagacgttggcgccctgggagaaggccaaacc

SEQ ID NO: 27014 - DNA, 40 bp, Artificial Sequence
  Description of Artificial Sequence: Synthetic primer
acctggaaagcaaaaggaaatccaagaaccagatcctacc

SEQ ID NO: 27015 - DNA, 40 bp, Artificial Sequence
  Description of Artificial Sequence: Synthetic primer
agtcccgagcgctccgggtgaacggcaaactgggggagag

SEQ ID NO: 27016 - DNA, 40 bp, Artificial Sequence
  Description of Artificial Sequence: Synthetic primer
cagctgtccatagggaggttgaatggttgctgcactttgg

SEQ ID NO: 27017 - DNA, 40 bp, Artificial Sequence
  Description of Artificial Sequence: Synthetic primer
gctaagaatgcattattgagggtcattctttattctttac

SEQ ID NO: 27018 - DNA, 40 bp, Artificial Sequence
  Description of Artificial Sequence: Synthetic primer
tgccctttcattccctcttttaaatgtagtgttgaatctc

SEQ ID NO: 27019 - DNA, 40 bp, Artificial Sequence
  Description of Artificial Sequence: Synthetic primer
tggcccggggctggcataataggctccttgcacacagaac

SEQ ID NO: 27020 - DNA, 40 bp, Artificial Sequence
  Description of Artificial Sequence: Synthetic primer
ggccctggatagcctccaccacctgcccggcgcagagaac

SEQ ID NO: 27021 - DNA, 40 bp, Artificial Sequence
  Description of Artificial Sequence: Synthetic primer
ggtggtgatgtggagggcacagtaaggctgaccacaggag

SEQ ID NO: 27022 - DNA, 40 bp, Artificial Sequence
  Description of Artificial Sequence: Synthetic primer
attatgaaaactcacttcatggattcagtgggcaaatagc

SEQ ID NO: 27023 - DNA, 40 bp, Artificial Sequence
  Description of Artificial Sequence: Synthetic primer
agacacgattgcgaacgcttctttatcttctttggtttgg

SEQ ID NO: 27024 - DNA, 40 bp, Artificial Sequence
  Description of Artificial Sequence: Synthetic primer
cagcgcctgcatcagcagcggggtggccatgcgcatcttg

SEQ ID NO: 27025 - DNA, 40 bp, Artificial Sequence
  Description of Artificial Sequence: Synthetic primer
aaaaaggaagaagagaaaacaaatgaaccagtattcttac

SEQ ID NO: 27026 - DNA, 40 bp, Artificial Sequence
  Description of Artificial Sequence: Synthetic primer
cccccagggcaaagaaatgcaagtgaatgaacaccttctc

SEQ ID NO: 27027 - DNA, 40 bp, Artificial Sequence
  Description of Artificial Sequence: Synthetic primer
cagttaacagtggagatgtttgactacctggagtgtgaac

SEQ ID NO: 27028 - DNA, 40 bp, Artificial Sequence
  Description of Artificial Sequence: Synthetic primer
cttcatgttataaataaagaaattgccctgtgacagctac

SEQ ID NO: 27029 - DNA, 40 bp, Artificial Sequence
  Description of Artificial Sequence: Synthetic primer
catttgggataccagatagctcaatactctctgagtacat

SEQ ID NO: 27030 - DNA, 40 bp, Artificial Sequence
  Description of Artificial Sequence: Synthetic primer
agtaaaagcatatcgcttatatcatttcttgctgaatttg

SEQ ID NO: 27031 - DNA, 40 bp, Artificial Sequence
  Description of Artificial Sequence: Synthetic primer
gaggaagaatcattatacaggaaacattgtacttctgttg

SEQ ID NO: 27032 - DNA, 40 bp, Artificial Sequence
  Description of Artificial Sequence: Synthetic primer
agcagagcttggaaggatgcttcagctcatcttaggctgt

SEQ ID NO: 27033 - DNA, 40 bp, Artificial Sequence
  Description of Artificial Sequence: Synthetic primer
tggtggagctctgttaggtcatttagctgttcttccaatc

SEQ ID NO: 27034 - DNA, 40 bp, Artificial Sequence
  Description of Artificial Sequence: Synthetic primer
ggcttttttaaaatcaaaagtaacaagagaacagcaagtg

SEQ ID NO: 27035 - DNA, 40 bp, Artificial Sequence
  Description of Artificial Sequence: Synthetic primer
aggggggaggcgtgcaatgtgatcagaaccctatgatttc

SEQ ID NO: 27036 - DNA, 40 bp, Artificial Sequence
  Description of Artificial Sequence: Synthetic primer
ctgccagtgcagatgttttagggcctcttggctaactcag

SEQ ID NO: 27037 - DNA, 40 bp, Artificial Sequence
  Description of Artificial Sequence: Synthetic primer
tctttttggaaagtattgtcaaggcttcttcttcatatcc

SEQ ID NO: 27038 - DNA, 40 bp, Artificial Sequence
  Description of Artificial Sequence: Synthetic primer
ttgccaatggccaggatcacccccatgcaaaccaggaatc

SEQ ID NO: 27039 - DNA, 40 bp, Artificial Sequence
  Description of Artificial Sequence: Synthetic primer
atgtacgtacaagtaggtattagccttgaaatgcttcttg

SEQ ID NO: 27040 - DNA, 40 bp, Artificial Sequence
  Description of Artificial Sequence: Synthetic primer
aggaattctgtttccccaggtagggatctcagtaagacac

SEQ ID NO: 27041 - DNA, 40 bp, Artificial Sequence
  Description of Artificial Sequence: Synthetic primer
gatgtgaagggctccggtacaaccttcaactatttcttcc

SEQ ID NO: 27042 - DNA, 40 bp, Artificial Sequence
  Description of Artificial Sequence: Synthetic primer
cgatttccaagtcatcttcatagtggagaaagtagtcctg

SEQ ID NO: 27043 - DNA, 40 bp, Artificial Sequence
  Description of Artificial Sequence: Synthetic primer
gtgcccttcttcggagacacaccagaggagctatttggac

SEQ ID NO: 27044 - DNA, 40 bp, Artificial Sequence
  Description of Artificial Sequence: Synthetic primer
agcccgccttgatcttctaagtgcgagttcatcgtctgag

SEQ ID NO: 27045 - DNA, 40 bp, Artificial Sequence
  Description of Artificial Sequence: Synthetic primer
cagtctcatgggcccgatgcgcacctccgcagaagacacc

SEQ ID NO: 27046 - DNA, 40 bp, Artificial Sequence
  Description of Artificial Sequence: Synthetic primer
tcagcactaagggagccagcgcacagcacagccaggaagg

SEQ ID NO: 27047 - DNA, 40 bp, Artificial Sequence
  Description of Artificial Sequence: Synthetic primer
ggccaagcagaacctggagcgccacatctccactctcaac

SEQ ID NO: 27048 - DNA, 40 bp, Artificial Sequence
  Description of Artificial Sequence: Synthetic primer
ggccctcaaggtttccaaggacctgctggtgagcctggtg

SEQ ID NO: 27049 - DNA, 40 bp, Artificial Sequence
  Description of Artificial Sequence: Synthetic primer
ttccagtctcctggggcagccccccagggtgggggtggtg

SEQ ID NO: 27050 - DNA, 40 bp, Artificial Sequence
  Description of Artificial Sequence: Synthetic primer
gaacatgctcacatgtttatgggaggctgcaatagtctgg

SEQ ID NO: 27051 - DNA, 40 bp, Artificial Sequence
  Description of Artificial Sequence: Synthetic primer
gggtctctgacaactttgtccgtctctaggatctgctctc

SEQ ID NO: 27052 - DNA, 40 bp, Artificial Sequence
  Description of Artificial Sequence: Synthetic primer
tggggttgctagtgacaccatagcatttggagagcatcac

SEQ ID NO: 27053 - DNA, 40 bp, Artificial Sequence
  Description of Artificial Sequence: Synthetic primer
acgtatgttttaactggttgtgttgttgtcgctcttgctc

SEQ ID NO: 27054 - DNA, 40 bp, Artificial Sequence
  Description of Artificial Sequence: Synthetic primer
tgctggttataatttccaaaatcattgtaatttccacttc

SEQ ID NO: 27055 - DNA, 40 bp, Artificial Sequence
  Description of Artificial Sequence: Synthetic primer
ccctgagcttgaatagcagtgggttcagtgaaattctgtc

SEQ ID NO: 27056 - DNA, 40 bp, Artificial Sequence
  Description of Artificial Sequence: Synthetic primer
gcctgcctctgggaacacagagcaccaagaactgacaaac

SEQ ID NO: 27057 - DNA, 40 bp, Artificial Sequence
  Description of Artificial Sequence: Synthetic primer
gggccacatgtccaaactcagacaggggcagtacctgaac

SEQ ID NO: 27058 - DNA, 40 bp, Artificial Sequence
  Description of Artificial Sequence: Synthetic primer
gcccgtggcagtgatggaagtgtgggtcccgtgggtcctg

SEQ ID NO: 27059 - DNA, 40 bp, Artificial Sequence
  Description of Artificial Sequence: Synthetic primer
catgatgaactccgctgctgtggtatcgcccagtccaatg

SEQ ID NO: 27060 - DNA, 40 bp, Artificial Sequence
  Description of Artificial Sequence: Synthetic primer
accccgtgcctcccacctgcccggctagggatgctcgaag

SEQ ID NO: 27061 - DNA, 40 bp, Artificial Sequence
  Description of Artificial Sequence: Synthetic primer
gttctcaaaatcataaaccatggctactcttgggaaccac

SEQ ID NO: 27062 - DNA, 40 bp, Artificial Sequence
  Description of Artificial Sequence: Synthetic primer
gcagatttacttggttttgttagtcggagtttcttagtag

SEQ ID NO: 27063 - DNA, 40 bp, Artificial Sequence
  Description of Artificial Sequence: Synthetic primer
gactttcacaaagcagtaatattccagggagcatagaacc

SEQ ID NO: 27064 - DNA, 40 bp, Artificial Sequence
  Description of Artificial Sequence: Synthetic primer
ccaacaagaaaacaaaacagtcaaaaataaaaccctgaag

SEQ ID NO: 27065 - DNA, 40 bp, Artificial Sequence
  Description of Artificial Sequence: Synthetic primer
cttgtgacatggatttgcctgcctctttgtctctataatg

SEQ ID NO: 27066 - DNA, 40 bp, Artificial Sequence
  Description of Artificial Sequence: Synthetic primer
tggagtccttattaaatgctagcaatgtggcaattgagtg

SEQ ID NO: 27067 - DNA, 40 bp, Artificial Sequence
  Description of Artificial Sequence: Synthetic primer
gaacgttgctctatgcatgctattgggtcatgcttttgac

SEQ ID NO: 27068 - DNA, 40 bp, Artificial Sequence
  Description of Artificial Sequence: Synthetic primer
ttcctcactaccagtggttcaaaaatgaattaccattaac

SEQ ID NO: 27069 - DNA, 40 bp, Artificial Sequence
  Description of Artificial Sequence: Synthetic primer
agggttagtcctcagactaatgatagtgtctgctttctgc

SEQ ID NO: 27070 - DNA, 40 bp, Artificial Sequence
  Description of Artificial Sequence: Synthetic primer
agggtaagagccaaaagcctcattgtgaaaggcactggac

SEQ ID NO: 27071 - DNA, 40 bp, Artificial Sequence
  Description of Artificial Sequence: Synthetic primer
ggacggggtgaactgggggaggattgtggccttctttgag

SEQ ID NO: 27072 - DNA, 40 bp, Artificial Sequence
  Description of Artificial Sequence: Synthetic primer
ccctcggcgtcccttcccctcccccgccctgccccctctc

SEQ ID NO: 27073 - DNA, 40 bp, Artificial Sequence
  Description of Artificial Sequence: Synthetic primer
ccctcagttagcatttcaaagtacatactagaaacaagag

SEQ ID NO: 27074 - DNA, 40 bp, Artificial Sequence
  Description of Artificial Sequence: Synthetic primer
cgcctgctgcagggcctggtcagcaagggcaactggatgg

SEQ ID NO: 27075 - DNA, 40 bp, Artificial Sequence
  Description of Artificial Sequence: Synthetic primer
ccaacttttctaagtttgattgctccattttgctattttc

SEQ ID NO: 27076 - DNA, 40 bp, Artificial Sequence
  Description of Artificial Sequence: Synthetic primer
cagcttatttgggggcttagtctaatttttattttcttag

SEQ ID NO: 27077 - DNA, 40 bp, Artificial Sequence
  Description of Artificial Sequence: Synthetic primer
ttataaagcatatattcattagcgacctgccacctctttg

SEQ ID NO: 27078 - DNA, 40 bp, Artificial Sequence
  Description of Artificial Sequence: Synthetic primer
aaacgtcggcaggttctaaaagatctagttaaagttattc

SEQ ID NO: 27079 - DNA, 40 bp, Artificial Sequence
  Description of Artificial Sequence: Synthetic primer
attgatgttatgcctctctatcttttatacgtattctttc

SEQ ID NO: 27080 - DNA, 40 bp, Artificial Sequence
  Description of Artificial Sequence: Synthetic primer
agggccccctcaggcatggtgcaggcgatgctggtatctg

SEQ ID NO: 27081 - DNA, 40 bp, Artificial Sequence
  Description of Artificial Sequence: Synthetic primer
aaatgagaagaatgacaaagataagaagatagctgagttg

SEQ ID NO: 27082 - DNA, 40 bp, Artificial Sequence
  Description of Artificial Sequence: Synthetic primer
agcccggatcccgagaaagatttagtaggagtgtaaagtg

SEQ ID NO: 27083 - DNA, 40 bp, Artificial Sequence
  Description of Artificial Sequence: Synthetic primer
aaaagctgaagtgcagaaattacaggccctggcaaatgag

SEQ ID NO: 27084 - DNA, 40 bp, Artificial Sequence
  Description of Artificial Sequence: Synthetic primer
attccagtgactagtaatggagaagttgatgactctcgtg

SEQ ID NO: 27085 - DNA, 40 bp, Artificial Sequence
  Description of Artificial Sequence: Synthetic primer
ttcagacagtctagctgcagagattgttacacctgaaatc

SEQ ID NO: 27086 - DNA, 40 bp, Artificial Sequence
  Description of Artificial Sequence: Synthetic primer
cggggggtgcatgtagagtggtgagtggctctcgctgctg

SEQ ID NO: 27087 - DNA, 40 bp, Artificial Sequence
  Description of Artificial Sequence: Synthetic primer
ggaacacgtgaagttttaaatgaggaagatgaagtacaac

SEQ ID NO: 27088 - DNA, 40 bp, Artificial Sequence
  Description of Artificial Sequence: Synthetic primer
ctgctgtcagtggcccggggcaaagtgtccgagggaatcg

SEQ ID NO: 27089 - DNA, 40 bp, Artificial Sequence
  Description of Artificial Sequence: Synthetic primer
aatctgtgttctgtgaccattcttagcgtgatactttatg

SEQ ID NO: 27090 - DNA, 40 bp, Artificial Sequence
  Description of Artificial Sequence: Synthetic primer
agactcctttaaattcatatcatcaaagttatcaacaatc

SEQ ID NO: 27091 - DNA, 40 bp, Artificial Sequence
  Description of Artificial Sequence: Synthetic primer
ggttatcagactgaaaatctgggacaaactgttcatcatc

SEQ ID NO: 27092 - DNA, 40 bp, Artificial Sequence
  Description of Artificial Sequence: Synthetic primer
ttttatagtataaatattcaataaattcttcttcttttgg

SEQ ID NO: 27093 - DNA, 40 bp, Artificial Sequence
  Description of Artificial Sequence: Synthetic primer
ggcgtacttataaatctctgccatggccacattggtgttg

SEQ ID NO: 27094 - DNA, 40 bp, Artificial Sequence
  Description of Artificial Sequence: Synthetic primer
gatcagggccaacagggatactgtcttcccggtgcctgag

SEQ ID NO: 27095 - DNA, 40 bp, Artificial Sequence
  Description of Artificial Sequence: Synthetic primer
agcaacctaccagtattattttcaaagcctctaattctac

SEQ ID NO: 27096 - DNA, 40 bp, Artificial Sequence
  Description of Artificial Sequence: Synthetic primer
actggaatttgatggaaagaaggtttgtgtgtttaagacg

SEQ ID NO: 27097 - DNA, 40 bp, Artificial Sequence
  Description of Artificial Sequence: Synthetic primer
acaaggaaaaacgatagatttgactgaatgccaatccttg

SEQ ID NO: 27098 - DNA, 40 bp, Artificial Sequence
  Description of Artificial Sequence: Synthetic primer
caaatttatattcagttgtctgaagttgataaaacaaagg

SEQ ID NO: 27099 - DNA, 40 bp, Artificial Sequence
  Description of Artificial Sequence: Synthetic primer
ggcacagctagttttcccgatttggataaaagttgatctg

SEQ ID NO: 27100 - DNA, 40 bp, Artificial Sequence
  Description of Artificial Sequence: Synthetic primer
gccgcctcgttttcttcttggtctttttgcccttttcctc

SEQ ID NO: 27101 - DNA, 40 bp, Artificial Sequence
  Description of Artificial Sequence: Synthetic primer
cgggctgtcaagttacacaataatcaactcatcagtgagc

SEQ ID NO: 27102 - DNA, 40 bp, Artificial Sequence
  Description of Artificial Sequence: Synthetic primer
tcatgatttctgctattagctggcctctttgtaaatcaac

SEQ ID NO: 27103 - DNA, 40 bp, Artificial Sequence
  Description of Artificial Sequence: Synthetic primer
ggagtcggagggcttggagttccaggtgttgggggccttg

SEQ ID NO: 27104 - DNA, 40 bp, Artificial Sequence
  Description of Artificial Sequence: Synthetic primer
actgtgtaatacacgagtttaaaaattaagagcgattagc

SEQ ID NO: 27105 - DNA, 40 bp, Artificial Sequence
  Description of Artificial Sequence: Synthetic primer
ttcttgataggttactgattatgggtattaacaggagttg

SEQ ID NO: 27106 - DNA, 40 bp, Artificial Sequence
  Description of Artificial Sequence: Synthetic primer
agacaagcttgaatattgtttttgcaccagacgaacagtg

SEQ ID NO: 27107 - DNA, 40 bp, Artificial Sequence
  Description of Artificial Sequence: Synthetic primer
cgcagctgttctccctgaacctctggcaccgtggcctctc

SEQ ID NO: 27108 - DNA, 40 bp, Artificial Sequence
  Description of Artificial Sequence: Synthetic primer
aataaaatcccctaagcttaaatcctcaaaattttctttc

SEQ ID NO: 27109 - DNA, 40 bp, Artificial Sequence
  Description of Artificial Sequence: Synthetic primer
aaaaacatgatatattgctttacttaataggttgaatatg

SEQ ID NO: 27110 - DNA, 40 bp, Artificial Sequence
  Description of Artificial Sequence: Synthetic primer
ggcagcgacagagccaaaatcagagctggaacctgaggag

SEQ ID NO: 27111 - DNA, 40 bp, Artificial Sequence
  Description of Artificial Sequence: Synthetic primer
tgatctccaagaggcaggaaagtcctccttgtcatgtttc

SEQ ID NO: 27112 - DNA, 40 bp, Artificial Sequence
  Description of Artificial Sequence: Synthetic primer
atttttggaatggggagagggacaaactatttttcaaagc

SEQ ID NO: 27113 - DNA, 40 bp, Artificial Sequence
  Description of Artificial Sequence: Synthetic primer
ctgtgccataacctcagacatgatctctccattgtagtcg

SEQ ID NO: 27114 - DNA, 40 bp, Artificial Sequence
  Description of Artificial Sequence: Synthetic primer
agtttctcttctttctctaaccgataattttcctctactg

SEQ ID NO: 27115 - DNA, 40 bp, Artificial Sequence
  Description of Artificial Sequence: Synthetic primer
aagtaagtaagctcaatagtcaagtaaatggctggcaaag

SEQ ID NO: 27116 - DNA, 40 bp, Artificial Sequence
  Description of Artificial Sequence: Synthetic primer
ccctagcttagagcctccctcaattccccctggccaccac

SEQ ID NO: 27117 - DNA, 40 bp, Artificial Sequence
  Description of Artificial Sequence: Synthetic primer
gccaggcaccctccctgacctgtctcggcctcccgactcc

SEQ ID NO: 27118 - DNA, 40 bp, Artificial Sequence
  Description of Artificial Sequence: Synthetic primer
tctggttctggagagggcttccttttccttgctgttcttg

SEQ ID NO: 27119 - DNA, 40 bp, Artificial Sequence
  Description of Artificial Sequence: Synthetic primer
aaagccgggcagaaccatgctagcggaagatgtgaaatcc

SEQ ID NO: 27120 - DNA, 40 bp, Artificial Sequence
  Description of Artificial Sequence: Synthetic primer
agattcttgtgttttgaatttctcattgaattggctactc

SEQ ID NO: 27121 - DNA, 40 bp, Artificial Sequence
  Description of Artificial Sequence: Synthetic primer
ggttttggcaaaacttcgggagccatggtagttactgtcc

SEQ ID NO: 27122 - DNA, 40 bp, Artificial Sequence
  Description of Artificial Sequence: Synthetic primer
gagcaagccgtggaggaaaaccttagttcctattccttag

SEQ ID NO: 27123 - DNA, 40 bp, Artificial Sequence
  Description of Artificial Sequence: Synthetic primer
gggaggatcctcaggaatcagggaccctccaaggaaagag

SEQ ID NO: 27124 - DNA, 40 bp, Artificial Sequence
  Description of Artificial Sequence: Synthetic primer
cagcagtgcctgtgtgtccctcggtctggggtggcaagac

SEQ ID NO: 27125 - DNA, 40 bp, Artificial Sequence
  Description of Artificial Sequence: Synthetic primer
gcagctggcttttgtgacggaaatgcaggttacacttctc

SEQ ID NO: 27126 - DNA, 40 bp, Artificial Sequence
  Description of Artificial Sequence: Synthetic primer
atgcgtctatatggattcccttcaacaggttctaattctg

SEQ ID NO: 27127 - DNA, 40 bp, Artificial Sequence
  Description of Artificial Sequence: Synthetic primer
gcagccctcccagaaaatgtcattctggtgaacaccactg

SEQ ID NO: 27128 - DNA, 40 bp, Artificial Sequence
  Description of Artificial Sequence: Synthetic primer
cttgaattcaatcaactctttttgaatactgtaaaccaac

SEQ ID NO: 27129 - DNA, 40 bp, Artificial Sequence
  Description of Artificial Sequence: Synthetic primer
acgatatccttttccacagatgaactaactagaaataatg

SEQ ID NO: 27130 - DNA, 40 bp, Artificial Sequence
  Description of Artificial Sequence: Synthetic primer
tgccatggtgacggggtggaagtccaggatcttggggtag

SEQ ID NO: 27131 - DNA, 40 bp, Artificial Sequence
  Description of Artificial Sequence: Synthetic primer
gactgaaaaacagcaatttgcctttgataaaggtgttctc

SEQ ID NO: 27132 - DNA, 40 bp, Artificial Sequence
  Description of Artificial Sequence: Synthetic primer
cctgcagttctgcattgtcccgttcacctttctctaactc

SEQ ID NO: 27133 - DNA, 40 bp, Artificial Sequence
  Description of Artificial Sequence: Synthetic primer
agtggcagcaagacctggcttcggattgtctcccattttc

SEQ ID NO: 27134 - DNA, 40 bp, Artificial Sequence
  Description of Artificial Sequence: Synthetic primer
ccagataccaacagttcacaggcgagaggaggtactggtc

SEQ ID NO: 27135 - DNA, 40 bp, Artificial Sequence
  Description of Artificial Sequence: Synthetic primer
ctgcttctctaagaggagcccttcctgcgcacgtgcattc

SEQ ID NO: 27136 - DNA, 40 bp, Artificial Sequence
  Description of Artificial Sequence: Synthetic primer
tacagtctgcattagaagaggaaagtgtattcgcagttac

SEQ ID NO: 27137 - DNA, 40 bp, Artificial Sequence
  Description of Artificial Sequence: Synthetic primer
gctcgcgctgtgccgggcgacgacgaggatggggatgcag

SEQ ID NO: 27138 - DNA, 40 bp, Artificial Sequence
  Description of Artificial Sequence: Synthetic primer
gccggggttgagattcattacaccacctccttccagaatc

SEQ ID NO: 27139 - DNA, 40 bp, Artificial Sequence
  Description of Artificial Sequence: Synthetic primer
tgtgcctgtggaactcaatggaacacaggctggaatggac

SEQ ID NO: 27140 - DNA, 40 bp, Artificial Sequence
  Description of Artificial Sequence: Synthetic primer
tcacgaggtccctcaacataagaacagaaccaatcatttc

SEQ ID NO: 27141 - DNA, 40 bp, Artificial Sequence
  Description of Artificial Sequence: Synthetic primer
gctgctgcaggtggtgctgctgctgcggtgagcgtgagac

SEQ ID NO: 27142 - DNA, 40 bp, Artificial Sequence
  Description of Artificial Sequence: Synthetic primer
ccctgtgggtcccaggcagggcaggggcagacacaatctc

SEQ ID NO: 27143 - DNA, 40 bp, Artificial Sequence
  Description of Artificial Sequence: Synthetic primer
ttatccagatgaatttacaaaactgtaccagatcccacag

SEQ ID NO: 27144 - DNA, 40 bp, Artificial Sequence
  Description of Artificial Sequence: Synthetic primer
atgctctgtccgcagacttcatctggataaaggcatctcc

SEQ ID NO: 27145 - DNA, 40 bp, Artificial Sequence
  Description of Artificial Sequence: Synthetic primer
aatgaatgtggacagaattcacagaaggaaacagctgcac

SEQ ID NO: 27146 - DNA, 40 bp, Artificial Sequence
  Description of Artificial Sequence: Synthetic primer
ctctttagaatatagatatcatttatagtaagctggagat

SEQ ID NO: 27147 - DNA, 40 bp, Artificial Sequence
  Description of Artificial Sequence: Synthetic primer
tcccgggggcgcagcttggagagccgggggcgcagcttgg

SEQ ID NO: 27148 - DNA, 40 bp, Artificial Sequence
  Description of Artificial Sequence: Synthetic primer
gcagctgttctccctgaacctctggcaccgtggcctctcc

SEQ ID NO: 27149 - DNA, 40 bp, Artificial Sequence
  Description of Artificial Sequence: Synthetic primer
atccgttttcttaatggtccagatattttgccaattcttc

SEQ ID NO: 27150 - DNA, 40 bp, Artificial Sequence
  Description of Artificial Sequence: Synthetic primer
tttactggttatgggaagggagaaataaaatcatcaaacc

SEQ ID NO: 27151 - DNA, 40 bp, Artificial Sequence
  Description of Artificial Sequence: Synthetic primer
gggagcacgccacctgggtatacacctggcagccccacac

SEQ ID NO: 27152 - DNA, 40 bp, Artificial Sequence
  Description of Artificial Sequence: Synthetic primer
gatcttttttagctacatcccaagatgctgactgtccttc

SEQ ID NO: 27153 - DNA, 40 bp, Artificial Sequence
  Description of Artificial Sequence: Synthetic primer
catttttttctgtccctcagtgttggcctcctgttctgtc

SEQ ID NO: 27154 - DNA, 40 bp, Artificial Sequence
  Description of Artificial Sequence: Synthetic primer
tggggtggcttggggcaaaggtaacagtcagaggagagtc

SEQ ID NO: 27155 - DNA, 40 bp, Artificial Sequence
  Description of Artificial Sequence: Synthetic primer
acactatttccagttttgttcagtatttggcttccctacg

SEQ ID NO: 27156 - DNA, 40 bp, Artificial Sequence
  Description of Artificial Sequence: Synthetic primer
atttcaagttcgaattacagttgtgagattgatttattta

SEQ ID NO: 27157 - DNA, 40 bp, Artificial Sequence
  Description of Artificial Sequence: Synthetic primer
gacccctcccaggagggacccacagggctgaaggaagctg

SEQ ID NO: 27158 - DNA, 40 bp, Artificial Sequence
  Description of Artificial Sequence: Synthetic primer
tataatccaagattccttttaaaattttctttaaattgct

SEQ ID NO: 27159 - DNA, 40 bp, Artificial Sequence
  Description of Artificial Sequence: Synthetic primer
tcccattctaacagcaatttaaaatccaaattttcacaag

SEQ ID NO: 27160 - DNA, 40 bp, Artificial Sequence
  Description of Artificial Sequence: Synthetic primer
aaaagacacaggttttgacaataaatggtactcacattcc

SEQ ID NO: 27161 - DNA, 40 bp, Artificial Sequence
  Description of Artificial Sequence: Synthetic primer
ctttgctactctctggtaagacttgaatgtgattatttta

SEQ ID NO: 27162 - DNA, 40 bp, Artificial Sequence
  Description of Artificial Sequence: Synthetic primer
gctcaggattaagaagcaaatctacatattcagcttcagg

SEQ ID NO: 27163 - DNA, 40 bp, Artificial Sequence
  Description of Artificial Sequence: Synthetic primer
cgctcctccaggcggagcaggctctgcaggacacgctggt

SEQ ID NO: 27164 - DNA, 40 bp, Artificial Sequence
  Description of Artificial Sequence: Synthetic primer
tcccccagagtggagaagggctagcctgaggggtcacagc

SEQ ID NO: 27165 - DNA, 40 bp, Artificial Sequence
  Description of Artificial Sequence: Synthetic primer
aggcgccccaagccgggggcctggtgaaatgagggcttgc

SEQ ID NO: 27166 - DNA, 40 bp, Artificial Sequence
  Description of Artificial Sequence: Synthetic primer
catcgcctctctctaggaatggctgatgattgatgtggac

SEQ ID NO: 27167 - DNA, 40 bp, Artificial Sequence
  Description of Artificial Sequence: Synthetic primer
agagactgactgagcaggaatggtgagatgtttatcatgg

SEQ ID NO: 27168 - DNA, 40 bp, Artificial Sequence
  Description of Artificial Sequence: Synthetic primer
tttccccagagtgaacttaaagcatttctatctgttgctg

SEQ ID NO: 27169 - DNA, 40 bp, Artificial Sequence
  Description of Artificial Sequence: Synthetic primer
cgctggcttcatcatgcccatcgaggtgcacttcaaaaac

SEQ ID NO: 27170 - DNA, 40 bp, Artificial Sequence
  Description of Artificial Sequence: Synthetic primer
aatgagattgaagaaaacaagctcaaactagtccaacaag

SEQ ID NO: 27171 - DNA, 40 bp, Artificial Sequence
  Description of Artificial Sequence: Synthetic primer
cttgaagagcaggtgaggcgcccttgcttaaaagggaagc

SEQ ID NO: 27172 - DNA, 40 bp, Artificial Sequence
  Description of Artificial Sequence: Synthetic primer
ttaggaaattttaacatgagcttttcaagaaatggaattg

SEQ ID NO: 27173 - DNA, 40 bp, Artificial Sequence
  Description of Artificial Sequence: Synthetic primer
gatcaaggaacttcagaaaatacaccagttagaactacag

SEQ ID NO: 27174 - DNA, 40 bp, Artificial Sequence
  Description of Artificial Sequence: Synthetic primer
gacgtgtcgaagctgtctctggcagattcctttctgtatg

SEQ ID NO: 27175 - DNA, 40 bp, Artificial Sequence
  Description of Artificial Sequence: Synthetic primer
gttgaggcagcaaatatgcttgtgtctaatacatgccttg

SEQ ID NO: 27176 - DNA, 40 bp, Artificial Sequence
  Description of Artificial Sequence: Synthetic primer
ttcactgtgtcacagccaaaatcaattcaagaggatggag

SEQ ID NO: 27177 - DNA, 40 bp, Artificial Sequence
  Description of Artificial Sequence: Synthetic primer
gatggattgggaatttcataggaactagcaagccttggac

SEQ ID NO: 27178 - DNA, 40 bp, Artificial Sequence
  Description of Artificial Sequence: Synthetic primer
attcaaacaaagctcaaaccagaactgtaaatagtgattg

SEQ ID NO: 27179 - DNA, 40 bp, Artificial Sequence
  Description of Artificial Sequence: Synthetic primer
ggtctctcccggctgcttgtcccttttcctcttcttcttc

SEQ ID NO: 27180 - DNA, 40 bp, Artificial Sequence
  Description of Artificial Sequence: Synthetic primer
tacttctacgaacttcaagataatttggagaaacttttac

SEQ ID NO: 27181 - DNA, 40 bp, Artificial Sequence
  Description of Artificial Sequence: Synthetic primer
tctcattgtattctcggtcattagcccgcgccctcctttc

SEQ ID NO: 27182 - DNA, 40 bp, Artificial Sequence
  Description of Artificial Sequence: Synthetic primer
agtcgaggttagagggaactgggaggcactttgctgtctg

SEQ ID NO: 27183 - DNA, 40 bp, Artificial Sequence
  Description of Artificial Sequence: Synthetic primer
cttcatgatatgttcagcccctcaaagattaatgcctctc

SEQ ID NO: 27184 - DNA, 40 bp, Artificial Sequence
  Description of Artificial Sequence: Synthetic primer
cttaaatacttacaagatttcagtaactgcgtaacttatc

SEQ ID NO: 27185 - DNA, 40 bp, Artificial Sequence
  Description of Artificial Sequence: Synthetic primer
tgccagaccgtggaagatttaacgaatggggttgtgatgg

SEQ ID NO: 27186 - DNA, 40 bp, Artificial Sequence
  Description of Artificial Sequence: Synthetic primer
ttgatccagtgccatatctacatcttcttcatcagtaagc

SEQ ID NO: 27187 - DNA, 40 bp, Artificial Sequence
  Description of Artificial Sequence: Synthetic primer
gatccgcctctgcctcgacagagctgcagatttcctctcg

SEQ ID NO: 27188 - DNA, 40 bp, Artificial Sequence
  Description of Artificial Sequence: Synthetic primer
ggcacttcctgccacctcattgcactggtctcaaccattc

SEQ ID NO: 27189 - DNA, 40 bp, Artificial Sequence
  Description of Artificial Sequence: Synthetic primer
gacagattattagaagataagaaaatcactgtgttactgg

SEQ ID NO: 27190 - DNA, 40 bp, Artificial Sequence
  Description of Artificial Sequence: Synthetic primer
acaaaaaaatgtcttgatacttgaattcacatcttctgtg

SEQ ID NO: 27191 - DNA, 40 bp, Artificial Sequence
  Description of Artificial Sequence: Synthetic primer
acttatagactcaactatgtatctgtagtttttgggaatg

SEQ ID NO: 27192 - DNA, 40 bp, Artificial Sequence
  Description of Artificial Sequence: Synthetic primer
ttcaaggtggaaaaggtgaacagggtccccctggtcctcc

SEQ ID NO: 27193 - DNA, 40 bp, Artificial Sequence
  Description of Artificial Sequence: Synthetic primer
caggcactcagctcttcatgaattacacagcgtactatcc

SEQ ID NO: 27194 - DNA, 40 bp, Artificial Sequence
  Description of Artificial Sequence: Synthetic primer
caaattaaagtgacaagttaactaagggagctgactactg

SEQ ID NO: 27195 - DNA, 40 bp, Artificial Sequence
  Description of Artificial Sequence: Synthetic primer
tgcacagtgaagtcactttgatgtgtaactgctccaggtc

SEQ ID NO: 27196 - DNA, 40 bp, Artificial Sequence
  Description of Artificial Sequence: Synthetic primer
tgtctgctctctattggtgccttgcatttcaaaaacactg

SEQ ID NO: 27197 - DNA, 40 bp, Artificial Sequence
  Description of Artificial Sequence: Synthetic primer
aatgacggaagggggcaggcacaccacactggagaaatcc

SEQ ID NO: 27198 - DNA, 40 bp, Artificial Sequence
  Description of Artificial Sequence: Synthetic primer
agtgtctcctttcagtaaggtgaggcatccaacctcatgg

SEQ ID NO: 27199 - DNA, 40 bp, Artificial Sequence
  Description of Artificial Sequence: Synthetic primer
gcgactcttcacccaactcaagttcggagtggtacagaca

SEQ ID NO: 27200 - DNA, 40 bp, Artificial Sequence
  Description of Artificial Sequence: Synthetic primer
atcttaaagacttgaaggaaaaagtcagcctgttgcaagg

SEQ ID NO: 27201 - DNA, 40 bp, Artificial Sequence
  Description of Artificial Sequence: Synthetic primer
acccgccgcatgcagcggtgctgggccttctgcttcttcc

SEQ ID NO: 27202 - DNA, 40 bp, Artificial Sequence
  Description of Artificial Sequence: Synthetic primer
aggcgtgccgcttctggaatgggagacagaggtggaaatg

SEQ ID NO: 27203 - DNA, 40 bp, Artificial Sequence
  Description of Artificial Sequence: Synthetic primer
gcgttccatctcggcttgaaacacttcattctggagttgc

SEQ ID NO: 27204 - DNA, 40 bp, Artificial Sequence
  Description of Artificial Sequence: Synthetic primer
taagaaattgctaacaaagcacttttggacaatgctatcc

SEQ ID NO: 27205 - DNA, 40 bp, Artificial Sequence
  Description of Artificial Sequence: Synthetic primer
gccctcaacttgagttagtcacaccaaaatgcagtaaatg

SEQ ID NO: 27206 - DNA, 40 bp, Artificial Sequence
  Description of Artificial Sequence: Synthetic primer
gtgcgtcgtgaggtctgggtgcaggacctaggaagaagag

SEQ ID NO: 27207 - DNA, 40 bp, Artificial Sequence
  Description of Artificial Sequence: Synthetic primer
ccaaaaacagtcctggacgaccacacgcagaccctctttc

SEQ ID NO: 27208 - DNA, 40 bp, Artificial Sequence
  Description of Artificial Sequence: Synthetic primer
ggagaactttcgctgacaagttttacactggaatggtttc

SEQ ID NO: 27209 - DNA, 40 bp, Artificial Sequence
  Description of Artificial Sequence: Synthetic primer
gggtcatgctggtgatggtcaggaaagggctgttgttctc

SEQ ID NO: 27210 - DNA, 40 bp, Artificial Sequence
  Description of Artificial Sequence: Synthetic primer
caacagtgatgatgtgccgcaggcgtgggaccaaagaaac

SEQ ID NO: 27211 - DNA, 40 bp, Artificial Sequence
  Description of Artificial Sequence: Synthetic primer
atgagccgtggcctccaccacctgcccaaaggccccagag

SEQ ID NO: 27212 - DNA, 40 bp, Artificial Sequence
  Description of Artificial Sequence: Synthetic primer
gaattccctttcatttgaataggcaaacccaaatccatgc

SEQ ID NO: 27213 - DNA, 40 bp, Artificial Sequence
  Description of Artificial Sequence: Synthetic primer
ctctccagtaagtatcaattaagatactgggtcatttttc

SEQ ID NO: 27214 - DNA, 40 bp, Artificial Sequence
  Description of Artificial Sequence: Synthetic primer
gtctgcttgtcaaagtgtccttaagagcatagacactcac

SEQ ID NO: 27215 - DNA, 40 bp, Artificial Sequence
  Description of Artificial Sequence: Synthetic primer
ggaaggagatgagcacatcgtcctgtctcggaaagatcac

SEQ ID NO: 27216 - DNA, 40 bp, Artificial Sequence
  Description of Artificial Sequence: Synthetic primer
ggctttgataaaatctctgaacctttcactttctaaagac

SEQ ID NO: 27217 - DNA, 40 bp, Artificial Sequence
  Description of Artificial Sequence: Synthetic primer
taaaatacaactacttatgctcttaaatcaaggctgtctg

SEQ ID NO: 27218 - DNA, 40 bp, Artificial Sequence
  Description of Artificial Sequence: Synthetic primer
gaatgatccactgatatttactaccatacatgttctcctc

SEQ ID NO: 27219 - DNA, 40 bp, Artificial Sequence
  Description of Artificial Sequence: Synthetic primer
ttccagattacctaaaactaaaatcacgacccaaaatctg

SEQ ID NO: 27220 - DNA, 40 bp, Artificial Sequence
  Description of Artificial Sequence: Synthetic primer
tcacagctgggggcgtggtcagccccagtggcgagaaacc

SEQ ID NO: 27221 - DNA, 40 bp, Artificial Sequence
  Description of Artificial Sequence: Synthetic primer
catttttttcatttagaatcatatcatttcagtctttttc

SEQ ID NO: 27222 - DNA, 40 bp, Artificial Sequence
  Description of Artificial Sequence: Synthetic primer
gcagcatctgcggcttcaacagaagttagtatccttgctc

SEQ ID NO: 27223 - DNA, 40 bp, Artificial Sequence
  Description of Artificial Sequence: Synthetic primer
gatcttggagtacttgagggaggtggagcggacgatgtgc

SEQ ID NO: 27224 - DNA, 40 bp, Artificial Sequence
  Description of Artificial Sequence: Synthetic primer
tgaacttttgtatctctgcagtggtttcaaggacaaatag

SEQ ID NO: 27225 - DNA, 40 bp, Artificial Sequence
  Description of Artificial Sequence: Synthetic primer
cgtgccctgtccaggcctcacttcccgcgtccgcaaaacg

SEQ ID NO: 27226 - DNA, 40 bp, Artificial Sequence
  Description of Artificial Sequence: Synthetic primer
caaggaattaatccagagccctcagatgaagtgagggggg

SEQ ID NO: 27227 - DNA, 40 bp, Artificial Sequence
  Description of Artificial Sequence: Synthetic primer
tatatatttagtttttcagaaagtccatgagttttaacag

SEQ ID NO: 27228 - DNA, 40 bp, Artificial Sequence
  Description of Artificial Sequence: Synthetic primer
ggacctgctggtgcagacgctggagaacagcggggtcctg

SEQ ID NO: 27229 - DNA, 40 bp, Artificial Sequence
  Description of Artificial Sequence: Synthetic primer
ctcctgctgtctctcgtcaatcatcttggccatcttagtc

SEQ ID NO: 27230 - DNA, 40 bp, Artificial Sequence
  Description of Artificial Sequence: Synthetic primer
cctccgttttgggtttcttgctctcactggctcggttatc

SEQ ID NO: 27231 - DNA, 40 bp, Artificial Sequence
  Description of Artificial Sequence: Synthetic primer
gtgttgcttcaacagaagatagttcctcatcacatataac

SEQ ID NO: 27232 - DNA, 40 bp, Artificial Sequence
  Description of Artificial Sequence: Synthetic primer
gcattaaagatgagagggcccattactttatccagttcag

SEQ ID NO: 27233 - DNA, 40 bp, Artificial Sequence
  Description of Artificial Sequence: Synthetic primer
agttctgagattcactggtggagagtccaggacaggaatg

SEQ ID NO: 27234 - DNA, 40 bp, Artificial Sequence
  Description of Artificial Sequence: Synthetic primer
gcaccctctgctgcttgagccaggtcatcgcaagtttgac

SEQ ID NO: 27235 - DNA, 40 bp, Artificial Sequence
  Description of Artificial Sequence: Synthetic primer
gttgaatgacagatattctgtagaagatgtttatttaggc

SEQ ID NO: 27236 - DNA, 40 bp, Artificial Sequence
  Description of Artificial Sequence: Synthetic primer
ggcccctcaggtcccgctggtgaagttggcaaaccaggag

SEQ ID NO: 27237 - DNA, 40 bp, Artificial Sequence
  Description of Artificial Sequence: Synthetic primer
gaggaagcccagtctctgcttattcttcctttgttctgtc

SEQ ID NO: 27238 - DNA, 40 bp, Artificial Sequence
  Description of Artificial Sequence: Synthetic primer
cttgtgagttgcatattaagattactggaatggttaagtc

SEQ ID NO: 27239 - DNA, 40 bp, Artificial Sequence
  Description of Artificial Sequence: Synthetic primer
aggggcacctgggaagcctggagggccagcagacccaatg

SEQ ID NO: 27240 - DNA, 40 bp, Artificial Sequence
  Description of Artificial Sequence: Synthetic primer
tttggtttggtcttgtgatcaggtggtctatggggctatc

SEQ ID NO: 27241 - DNA, 40 bp, Artificial Sequence
  Description of Artificial Sequence: Synthetic primer
tcatggctatcattagccacaggtactgctgattataagg

SEQ ID NO: 27242 - DNA, 40 bp, Artificial Sequence
  Description of Artificial Sequence: Synthetic primer
cacaagagttctgagtgttgggatatgaggaaagaataac

SEQ ID NO: 27243 - DNA, 40 bp, Artificial Sequence
  Description of Artificial Sequence: Synthetic primer
tgcgcagggagatggagtagatgactccgttgatcagctc

SEQ ID NO: 27244 - DNA, 40 bp, Artificial Sequence
  Description of Artificial Sequence: Synthetic primer
catgggatttctgattgtgttacttcattttaggtcattc

SEQ ID NO: 27245 - DNA, 40 bp, Artificial Sequence
  Description of Artificial Sequence: Synthetic primer
agtgtttataacttcgaaggagaagactatagagaaaaac

SEQ ID NO: 27246 - DNA, 40 bp, Artificial Sequence
  Description of Artificial Sequence: Synthetic primer
gttggaccagccacaaatgaaagtcctggaatagattatg

SEQ ID NO: 27247 - DNA, 40 bp, Artificial Sequence
  Description of Artificial Sequence: Synthetic primer
accgtgtcttgcattttcttgtacctgttcaggcactgtc

SEQ ID NO: 27248 - DNA, 40 bp, Artificial Sequence
  Description of Artificial Sequence: Synthetic primer
cggacatcagcagcaaagccctgtgcgtctgggtactctc

SEQ ID NO: 27249 - DNA, 40 bp, Artificial Sequence
  Description of Artificial Sequence: Synthetic primer
gctttgattttgagggttagcaagacaaagcaaataaatg

SEQ ID NO: 27250 - DNA, 40 bp, Artificial Sequence
  Description of Artificial Sequence: Synthetic primer
cgccgctgccccaggagcctgagctgggccggtcctcaag

SEQ ID NO: 27251 - DNA, 40 bp, Artificial Sequence
  Description of Artificial Sequence: Synthetic primer
aagaatatgtctattttcatatgtgtgatactgacagagc

SEQ ID NO: 27252 - DNA, 40 bp, Artificial Sequence
  Description of Artificial Sequence: Synthetic primer
cctaatatcaaaatatactatggtgggtaagctctgattc

SEQ ID NO: 27253 - DNA, 40 bp, Artificial Sequence
  Description of Artificial Sequence: Synthetic primer
ctgaagtaatgtgtgggccgcatgcataaagtaagtaagg

SEQ ID NO: 27254 - DNA, 40 bp, Artificial Sequence
  Description of Artificial Sequence: Synthetic primer
agacccctggctctataagctgaattatggcagcccagtc

SEQ ID NO: 27255 - DNA, 40 bp, Artificial Sequence
  Description of Artificial Sequence: Synthetic primer
aatacagtttttgaaactgtaaatcaggtcgaattttgtg

SEQ ID NO: 27256 - DNA, 40 bp, Artificial Sequence
  Description of Artificial Sequence: Synthetic primer
caccttttacacaaatcttgggagaattggtgtcaggaag

SEQ ID NO: 27257 - DNA, 40 bp, Artificial Sequence
  Description of Artificial Sequence: Synthetic primer
ctttaagaggaaaagggaataaaaggggacggggagagtg

SEQ ID NO: 27258 - DNA, 40 bp, Artificial Sequence
  Description of Artificial Sequence: Synthetic primer
ccgcaggttgcccttggaggcatactccacgatgacatac

SEQ ID NO: 27259 - DNA, 40 bp, Artificial Sequence
  Description of Artificial Sequence: Synthetic primer
cggggtccgcgctgagccgccttctcggccgcctggtccc

SEQ ID NO: 27260 - DNA, 40 bp, Artificial Sequence
  Description of Artificial Sequence: Synthetic primer
gctactgaagaatttaaacaactggaagaagctatacaac

SEQ ID NO: 27261 - DNA, 40 bp, Artificial Sequence
  Description of Artificial Sequence: Synthetic primer
tttgtggagactaaagaatggagaactggagaatattaag

SEQ ID NO: 27262 - DNA, 40 bp, Artificial Sequence
  Description of Artificial Sequence: Synthetic primer
ccagccgctgcagggctcccatgggctgagtggggagcag

SEQ ID NO: 27263 - DNA, 40 bp, Artificial Sequence
  Description of Artificial Sequence: Synthetic primer
tgactttagttttcgacattatttttaggttttaagagtg

SEQ ID NO: 27264 - DNA, 40 bp, Artificial Sequence
  Description of Artificial Sequence: Synthetic primer
gcagcaagttagtggattaaaatctcccaagaggaatgac

SEQ ID NO: 27265 - DNA, 40 bp, Artificial Sequence
  Description of Artificial Sequence: Synthetic primer
gaatgtgcctctagtgtgaattttgtattcttattaaacg

SEQ ID NO: 27266 - DNA, 40 bp, Artificial Sequence
  Description of Artificial Sequence: Synthetic primer
tgacaacattgggagctgcaaacagtgaggggaaacatac

SEQ ID NO: 27267 - DNA, 40 bp, Artificial Sequence
  Description of Artificial Sequence: Synthetic primer
gcgggtggaataatctcaagaatcaaatcatactccttcc

SEQ ID NO: 27268 - DNA, 40 bp, Artificial Sequence
  Description of Artificial Sequence: Synthetic primer
agataccacagcatcaagatagtatacagctttctcaaac

SEQ ID NO: 27269 - DNA, 40 bp, Artificial Sequence
  Description of Artificial Sequence: Synthetic primer
tcaggccccgagcagacgcggccgcaggcgaaccccctac

SEQ ID NO: 27270 - DNA, 40 bp, Artificial Sequence
  Description of Artificial Sequence: Synthetic primer
agccagatgttggccatgaatattgagaagaaacttaatc

SEQ ID NO: 27271 - DNA, 40 bp, Artificial Sequence
  Description of Artificial Sequence: Synthetic primer
caggatctgaatctttccactgatgtccctgcttttctgc

SEQ ID NO: 27272 - DNA, 40 bp, Artificial Sequence
  Description of Artificial Sequence: Synthetic primer
atgggattgctgggatcttgctgggtgagatggcagtgtg

SEQ ID NO: 27273 - DNA, 40 bp, Artificial Sequence
  Description of Artificial Sequence: Synthetic primer
gtcgaacaagtgaatccctctgaaataacgcttccacaac

SEQ ID NO: 27274 - DNA, 40 bp, Artificial Sequence
  Description of Artificial Sequence: Synthetic primer
agcaaaagtttttgtgattgttacgtgatggtatttaagg

SEQ ID NO: 27275 - DNA, 40 bp, Artificial Sequence
  Description of Artificial Sequence: Synthetic primer
tgtctgtgggctcacgcacactgctctcaattgtttttac

SEQ ID NO: 27276 - DNA, 40 bp, Artificial Sequence
  Description of Artificial Sequence: Synthetic primer
acacagagagttacttggattatcatgagactgctgaatc

SEQ ID NO: 27277 - DNA, 40 bp, Artificial Sequence
  Description of Artificial Sequence: Synthetic primer
tctgaagaggacttcgagaccattaagctcatcagcaatg

SEQ ID NO: 27278 - DNA, 40 bp, Artificial Sequence
  Description of Artificial Sequence: Synthetic primer
tcaaacggcagttttctttctaagtaaatgatttccagtc

SEQ ID NO: 27279 - DNA, 40 bp, Artificial Sequence
  Description of Artificial Sequence: Synthetic primer
gccttcctcccccattcattcagctgagccagggggccta

SEQ ID NO: 27280 - DNA, 40 bp, Artificial Sequence
  Description of Artificial Sequence: Synthetic primer
cggggctcccaggacctccactaatcaccagaacaaaatg

SEQ ID NO: 27281 - DNA, 40 bp, Artificial Sequence
  Description of Artificial Sequence: Synthetic primer
ttaattttggaggccgtccacaacttccaggttcccatcc

SEQ ID NO: 27282 - DNA, 40 bp, Artificial Sequence
  Description of Artificial Sequence: Synthetic primer
acttggagggcatcggctagctgacattggtgatctgacg

SEQ ID NO: 27283 - DNA, 40 bp, Artificial Sequence
  Description of Artificial Sequence: Synthetic primer
gcaggaattccttcgagcaaagttcatatttccgcatgac

SEQ ID NO: 27284 - DNA, 40 bp, Artificial Sequence
  Description of Artificial Sequence: Synthetic primer
gcttgtagttatctacgtcttgattagacaccagtaattg

SEQ ID NO: 27285 - DNA, 40 bp, Artificial Sequence
  Description of Artificial Sequence: Synthetic primer
tccgcgcctcttccaggagggcaatcttggcagtgtattc

SEQ ID NO: 27286 - DNA, 40 bp, Artificial Sequence
  Description of Artificial Sequence: Synthetic primer
atgaccttgcattctgcttggccaccattggcagtgacag

SEQ ID NO: 27287 - DNA, 40 bp, Artificial Sequence
  Description of Artificial Sequence: Synthetic primer
tgccacactctccccaacgttcttcaggaaattcacactc

SEQ ID NO: 27288 - DNA, 40 bp, Artificial Sequence
  Description of Artificial Sequence: Synthetic primer
ctcagtgaatgagactgaggttttgacgatattaaggtag

SEQ ID NO: 27289 - DNA, 40 bp, Artificial Sequence
  Description of Artificial Sequence: Synthetic primer
aggtaagaacaatgtgtaaaatatgtctattactcaaaag

SEQ ID NO: 27290 - DNA, 40 bp, Artificial Sequence
  Description of Artificial Sequence: Synthetic primer
gggtatactctggaatttctggaccgtctctctggtacgc

SEQ ID NO: 27291 - DNA, 40 bp, Artificial Sequence
  Description of Artificial Sequence: Synthetic primer
gttgcatattgttgaattgtattgcggtggtatcaacctg

SEQ ID NO: 27292 - DNA, 40 bp, Artificial Sequence
  Description of Artificial Sequence: Synthetic primer
gttgtttttaaaaataacttttcccttaaacttaggaagg

SEQ ID NO: 27293 - DNA, 40 bp, Artificial Sequence
  Description of Artificial Sequence: Synthetic primer
ttccctgaggtagtcaaaccatttaaaaggaagttttgtg

SEQ ID NO: 27294 - DNA, 40 bp, Artificial Sequence
  Description of Artificial Sequence: Synthetic primer
gaacttttctaattggaccaacaccttggcttttctttag

SEQ ID NO: 27295 - DNA, 40 bp, Artificial Sequence
  Description of Artificial Sequence: Synthetic primer
gcccccacattggctgccttataaatatgtctgtgtgttg

SEQ ID NO: 27296 - DNA, 40 bp, Artificial Sequence
  Description of Artificial Sequence: Synthetic primer
aattggggaatagtatattaatactgaaagtaatcaacag

SEQ ID NO: 27297 - DNA, 40 bp, Artificial Sequence
  Description of Artificial Sequence: Synthetic primer
ttgaagctgcagaaacgttagaagaagctgctatgaggtc

SEQ ID NO: 27298 - DNA, 40 bp, Artificial Sequence
  Description of Artificial Sequence: Synthetic primer
aggcaccatcggcaactacgtgtctcggaccaacatcaac

SEQ ID NO: 27299 - DNA, 40 bp, Artificial Sequence
  Description of Artificial Sequence: Synthetic primer
ctgccgggcattgcaggatatccagtggggcctgtgactg

SEQ ID NO: 27300 - DNA, 40 bp, Artificial Sequence
  Description of Artificial Sequence: Synthetic primer
ggtcccattgggtctgctggccctccaggcttcccaggtg

SEQ ID NO: 27301 - DNA, 40 bp, Artificial Sequence
  Description of Artificial Sequence: Synthetic primer
tccatcagaaggtgatggagcagttaacaaggaagagaag

SEQ ID NO: 27302 - DNA, 40 bp, Artificial Sequence
  Description of Artificial Sequence: Synthetic primer
tctgggtttctttaagagagaaagttcttcggggtgtctg

SEQ ID NO: 27303 - DNA, 40 bp, Artificial Sequence
  Description of Artificial Sequence: Synthetic primer
cctcttttagtactggttcttcccttggtttttctgatac

SEQ ID NO: 27304 - DNA, 40 bp, Artificial Sequence
  Description of Artificial Sequence: Synthetic primer
gggaccgtggtggctcagagctcgaggtcgttggagatgc

SEQ ID NO: 27305 - DNA, 40 bp, Artificial Sequence
  Description of Artificial Sequence: Synthetic primer
cgggagatgttcaggggcagatcctcagagtcaaccacac

SEQ ID NO: 27306 - DNA, 40 bp, Artificial Sequence
  Description of Artificial Sequence: Synthetic primer
cattaagaaagagtcctgcatgtgatctcgaacctccttc

SEQ ID NO: 27307 - DNA, 40 bp, Artificial Sequence
  Description of Artificial Sequence: Synthetic primer
ttgctgtctcatcagcatattcacacatgaatgttgtttc

SEQ ID NO: 27308 - DNA, 40 bp, Artificial Sequence
  Description of Artificial Sequence: Synthetic primer
gccagggcatgtgtatgtgtctgctaatgtaaactttgtc

SEQ ID NO: 27309 - DNA, 40 bp, Artificial Sequence
  Description of Artificial Sequence: Synthetic primer
caccggaagactcactttgtctgccctgcgccagcctcac

SEQ ID NO: 27310 - DNA, 40 bp, Artificial Sequence
  Description of Artificial Sequence: Synthetic primer
ggtccttaatgtcagcgtcacttggctggctgggactttc

SEQ ID NO: 27311 - DNA, 40 bp, Artificial Sequence
  Description of Artificial Sequence: Synthetic primer
cggcactcagtgcaaataacaatagcaactcccccagcag

SEQ ID NO: 27312 - DNA, 40 bp, Artificial Sequence
  Description of Artificial Sequence: Synthetic primer
catggagaaggtccatgtggacaccagacagccccctgga

SEQ ID NO: 27313 - DNA, 40 bp, Artificial Sequence
  Description of Artificial Sequence: Synthetic primer
ccactgccatcgagcgctgcttcctctcgtcctccagctc

SEQ ID NO: 27314 - DNA, 40 bp, Artificial Sequence
  Description of Artificial Sequence: Synthetic primer
tcgtttatctgcagctgtagcatctggtgccaagtaattc

SEQ ID NO: 27315 - DNA, 40 bp, Artificial Sequence
  Description of Artificial Sequence: Synthetic primer
cttcctggttcccctggaaatatcggccccgctggaaaag

SEQ ID NO: 27316 - DNA, 40 bp, Artificial Sequence
  Description of Artificial Sequence: Synthetic primer
ggaatgtaattggagaggcttccagaggcacttggacttg

SEQ ID NO: 27317 - DNA, 40 bp, Artificial Sequence
  Description of Artificial Sequence: Synthetic primer
acatttgatgtttgaagttgtaatctgtcccatcataaac

SEQ ID NO: 27318 - DNA, 40 bp, Artificial Sequence
  Description of Artificial Sequence: Synthetic primer
cccggatcttcttcagggcattgttcttctgagcgatttc

SEQ ID NO: 27319 - DNA, 40 bp, Artificial Sequence
  Description of Artificial Sequence: Synthetic primer
cgggggtgggggaaggaggccgtttgtgtggtagtgtagc

SEQ ID NO: 27320 - DNA, 40 bp, Artificial Sequence
  Description of Artificial Sequence: Synthetic primer
tgcattaacctgttcatacacccattttgtccctttattg

SEQ ID NO: 27321 - DNA, 40 bp, Artificial Sequence
  Description of Artificial Sequence: Synthetic primer
taattaattgtaatctgaataaagtgtaacaattgtgtag

SEQ ID NO: 27322 - DNA, 40 bp, Artificial Sequence
  Description of Artificial Sequence: Synthetic primer
gggcattgcacttgagacattttagaatcaggagggagac

SEQ ID NO: 27323 - DNA, 40 bp, Artificial Sequence
  Description of Artificial Sequence: Synthetic primer
aactatgccttaaaaatcagaaccttttctccccactatg

SEQ ID NO: 27324 - DNA, 40 bp, Artificial Sequence
  Description of Artificial Sequence: Synthetic primer
cgagctcaggaggcagcgggaggacaccgagaaggctcag

SEQ ID NO: 27325 - DNA, 40 bp, Artificial Sequence
  Description of Artificial Sequence: Synthetic primer
caggccaaatcacccttagaaggctgcagataacagaaag

SEQ ID NO: 27326 - DNA, 40 bp, Artificial Sequence
  Description of Artificial Sequence: Synthetic primer
ccctttaaattcagctatggagaaaagtgcctgtacaatg

SEQ ID NO: 27327 - DNA, 40 bp, Artificial Sequence
  Description of Artificial Sequence: Synthetic primer
tgcttcaagggttttgtctgagttatctcgatactgtagg

SEQ ID NO: 27328 - DNA, 40 bp, Artificial Sequence
  Description of Artificial Sequence: Synthetic primer
cacttaaggcagaaattaaaatcataatataaacgcttgg

SEQ ID NO: 27329 - DNA, 40 bp, Artificial Sequence
  Description of Artificial Sequence: Synthetic primer
attagccactcacaggagaggtgcttgtgcactctgattc

SEQ ID NO: 27330 - DNA, 40 bp, Artificial Sequence
  Description of Artificial Sequence: Synthetic primer
acgttttcgcaaaagagatactggctttaagataggagtg

SEQ ID NO: 27331 - DNA, 40 bp, Artificial Sequence
  Description of Artificial Sequence: Synthetic primer
aagaggatccttgggaggaagaccaagtggggtaccatcg

SEQ ID NO: 27332 - DNA, 40 bp, Artificial Sequence
  Description of Artificial Sequence: Synthetic primer
catctcattcctcgcaaatttgagctcttctgatcaattc

SEQ ID NO: 27333 - DNA, 40 bp, Artificial Sequence
  Description of Artificial Sequence: Synthetic primer
gccgggcagggtaagaggaacaggcagctgcaggaaaatg

SEQ ID NO: 27334 - DNA, 40 bp, Artificial Sequence
  Description of Artificial Sequence: Synthetic primer
tgggatcctcggaattctccacctccctcttagccaccag

SEQ ID NO: 27335 - DNA, 40 bp, Artificial Sequence
  Description of Artificial Sequence: Synthetic primer
gatcacggcccggctggggtacacgctgcccaggtaattg

SEQ ID NO: 27336 - DNA, 40 bp, Artificial Sequence
  Description of Artificial Sequence: Synthetic primer
aaagcagcatgtcttcacacaaagacataataggatagtg

SEQ ID NO: 27337 - DNA, 40 bp, Artificial Sequence
  Description of Artificial Sequence: Synthetic primer
gaaacaaccatctggggactgctgggaaatgctgtgaatg

SEQ ID NO: 27338 - DNA, 40 bp, Artificial Sequence
  Description of Artificial Sequence: Synthetic primer
ccttcatcttggaggagccggcaatcacatcaactttctc

SEQ ID NO: 27339 - DNA, 40 bp, Artificial Sequence
  Description of Artificial Sequence: Synthetic primer
gcgcaatggagaagagattacaagagatgaaggagaaaag

SEQ ID NO: 27340 - DNA, 40 bp, Artificial Sequence
  Description of Artificial Sequence: Synthetic primer
atgcaagacccactcctttctttatggaccctatttacag

SEQ ID NO: 27341 - DNA, 40 bp, Artificial Sequence
  Description of Artificial Sequence: Synthetic primer
ggcactcttggggcgcgggcgcacgacgggaggcgatgag

SEQ ID NO: 27342 - DNA, 40 bp, Artificial Sequence
  Description of Artificial Sequence: Synthetic primer
ttaatttacataagggtttgtgtttaagctggtccttttc

SEQ ID NO: 27343 - DNA, 40 bp, Artificial Sequence
  Description of Artificial Sequence: Synthetic primer
cattttgtttttcataaagttgagagaagcaaatcctaag

SEQ ID NO: 27344 - DNA, 40 bp, Artificial Sequence
  Description of Artificial Sequence: Synthetic primer
caataaataaagaacaattttccaagagaaaaaatgacac

SEQ ID NO: 27345 - DNA, 40 bp, Artificial Sequence
  Description of Artificial Sequence: Synthetic primer
ttccaggccctccgaccgggaatcccagggagctgtcctc

SEQ ID NO: 27346 - DNA, 40 bp, Artificial Sequence
  Description of Artificial Sequence: Synthetic primer
ccaggaccctgttgctatggtgacacagcgtttctaggac

SEQ ID NO: 27347 - DNA, 40 bp, Artificial Sequence
  Description of Artificial Sequence: Synthetic primer
ttctccagataatactcaaagggcaagctttaggaacaac

SEQ ID NO: 27348 - DNA, 40 bp, Artificial Sequence
  Description of Artificial Sequence: Synthetic primer
tcttcattgcttgagaagtttctttcccagccctggtctc

SEQ ID NO: 27349 - DNA, 40 bp, Artificial Sequence
  Description of Artificial Sequence: Synthetic primer
ctcgaagacgaccttcagctcagtgacagtgaggacagtg

SEQ ID NO: 27350 - DNA, 40 bp, Artificial Sequence
  Description of Artificial Sequence: Synthetic primer
ccgacccccaccacccccaacccccagctatgatttgcac

SEQ ID NO: 27351 - DNA, 40 bp, Artificial Sequence
  Description of Artificial Sequence: Synthetic primer
cagaaaaatccatgattgttcagccttcacacccttcttc

SEQ ID NO: 27352 - DNA, 40 bp, Artificial Sequence
  Description of Artificial Sequence: Synthetic primer
aaggaggcaacagaagcacaaagtttggaggtagaaaatc

SEQ ID NO: 27353 - DNA, 40 bp, Artificial Sequence
  Description of Artificial Sequence: Synthetic primer
tttttcattgcccagacaatcgaggttgtagttaaaagtc

SEQ ID NO: 27354 - DNA, 40 bp, Artificial Sequence
  Description of Artificial Sequence: Synthetic primer
cagaataaagatgaaggaaagaagccagaagttaagaaag

SEQ ID NO: 27355 - DNA, 40 bp, Artificial Sequence
  Description of Artificial Sequence: Synthetic primer
ccgtgggtcctgctggcaaacatggaaaccgtggtgaaac

SEQ ID NO: 27356 - DNA, 40 bp, Artificial Sequence
  Description of Artificial Sequence: Synthetic primer
agagggcagaagcactgaaacaaggcaatgcaattatgag

SEQ ID NO: 27357 - DNA, 40 bp, Artificial Sequence
  Description of Artificial Sequence: Synthetic primer
gcccggctcatttggctgttttcttacaccatgtagtttc

SEQ ID NO: 27358 - DNA, 40 bp, Artificial Sequence
  Description of Artificial Sequence: Synthetic primer
gcggaaagcgtagagggagtagtcaggattctcttggaac

SEQ ID NO: 27359 - DNA, 40 bp, Artificial Sequence
  Description of Artificial Sequence: Synthetic primer
ggtaaatcttagctactgaccggctaatttttcgagtaac

SEQ ID NO: 27360 - DNA, 40 bp, Artificial Sequence
  Description of Artificial Sequence: Synthetic primer
ataattttatttttcttttggaactaaaatacatggttgg

SEQ ID NO: 27361 - DNA, 40 bp, Artificial Sequence
  Description of Artificial Sequence: Synthetic primer
ctttttaaaaatgaatctgtaccactgtaattttatttag

SEQ ID NO: 27362 - DNA, 40 bp, Artificial Sequence
  Description of Artificial Sequence: Synthetic primer
catatacttcaagaaaaacccagtgctccaagggctttag

SEQ ID NO: 27363 - DNA, 40 bp, Artificial Sequence
  Description of Artificial Sequence: Synthetic primer
gaagaaatagaaaataattcttaccatatgcacccagcag

SEQ ID NO: 27364 - DNA, 40 bp, Artificial Sequence
  Description of Artificial Sequence: Synthetic primer
gactcaaaggttctagcttagaaaaactggtggattgctg

SEQ ID NO: 27365 - DNA, 40 bp, Artificial Sequence
  Description of Artificial Sequence: Synthetic primer
gcgctcgcccacgcacagctaccgctccacgcctgactcc

SEQ ID NO: 27366 - DNA, 40 bp, Artificial Sequence
  Description of Artificial Sequence: Synthetic primer
ggcggggggagggctcccgtccgccacccggggtctccag

SEQ ID NO: 27367 - DNA, 40 bp, Artificial Sequence
  Description of Artificial Sequence: Synthetic primer
cccactgttaacaacgactattcctattaccacatttctg

SEQ ID NO: 27368 - DNA, 40 bp, Artificial Sequence
  Description of Artificial Sequence: Synthetic primer
gtagggtgtggtgcggactatagcatgcatcagggagagg

SEQ ID NO: 27369 - DNA, 40 bp, Artificial Sequence
  Description of Artificial Sequence: Synthetic primer
cagccaaagacacacgacaaaagagacaatcgatataatg

SEQ ID NO: 27370 - DNA, 40 bp, Artificial Sequence
  Description of Artificial Sequence: Synthetic primer
cccggcgacagcgagggaccttggcgcggctctgccttag

SEQ ID NO: 27371 - DNA, 40 bp, Artificial Sequence
  Description of Artificial Sequence: Synthetic primer
gcggcacccgtggcagccctggcggacgcaggagcgatgg

SEQ ID NO: 27372 - DNA, 40 bp, Artificial Sequence
  Description of Artificial Sequence: Synthetic primer
tcttaagtacattttaaacagaataaagtagtgcttccac

SEQ ID NO: 27373 - DNA, 40 bp, Artificial Sequence
  Description of Artificial Sequence: Synthetic primer
agtgttttgtatgttagcatcgactctttctttttatttc

SEQ ID NO: 27374 - DNA, 40 bp, Artificial Sequence
  Description of Artificial Sequence: Synthetic primer
tttgctaaactctttgagcttagggtgggtgagggaaagg

SEQ ID NO: 27375 - DNA, 40 bp, Artificial Sequence
  Description of Artificial Sequence: Synthetic primer
cacagccttggctggtgggtgccctctctagactggtatc

SEQ ID NO: 27376 - DNA, 40 bp, Artificial Sequence
  Description of Artificial Sequence: Synthetic primer
gtaaaaaagtgaaaaatgatgactcgtcaaaagagattcc

SEQ ID NO: 27377 - DNA, 40 bp, Artificial Sequence
  Description of Artificial Sequence: Synthetic primer
aatgcacgtgcagaacgactatcataaccagaggaatgtc

SEQ ID NO: 27378 - DNA, 40 bp, Artificial Sequence
  Description of Artificial Sequence: Synthetic primer
gatctgtatcttcctcttcctcatcagggttataggtctc

SEQ ID NO: 27379 - DNA, 40 bp, Artificial Sequence
  Description of Artificial Sequence: Synthetic primer
taggctttggtctcctctaaagcttttctcttgtctgtag

SEQ ID NO: 27380 - DNA, 40 bp, Artificial Sequence
  Description of Artificial Sequence: Synthetic primer
atctgattcctcctcattgtcatcagaatgcagatctttc

SEQ ID NO: 27381 - DNA, 40 bp, Artificial Sequence
  Description of Artificial Sequence: Synthetic primer
ccaaaactggaccatgaagaatgtgacctacaaggagaac

SEQ ID NO: 27382 - DNA, 40 bp, Artificial Sequence
  Description of Artificial Sequence: Synthetic primer
tttttggtaaaatttcttctgtaaaaacctccctatgttc

SEQ ID NO: 27383 - DNA, 40 bp, Artificial Sequence
  Description of Artificial Sequence: Synthetic primer
gatgttttccatgcagtaaagacactgaggaacagcaagc

SEQ ID NO: 27384 - DNA, 40 bp, Artificial Sequence
  Description of Artificial Sequence: Synthetic primer
ttcatctttatgtgcttcaaattgtatgtggccctttttc

SEQ ID NO: 27385 - DNA, 40 bp, Artificial Sequence
  Description of Artificial Sequence: Synthetic primer
atgtcagaagtcttaggaataacagatgacaaccacgttc

SEQ ID NO: 27386 - DNA, 40 bp, Artificial Sequence
  Description of Artificial Sequence: Synthetic primer
ggaccgtggttttgcaggaaatgtgaatctcaggagagag

SEQ ID NO: 27387 - DNA, 40 bp, Artificial Sequence
  Description of Artificial Sequence: Synthetic primer
ctttctttcatctccaactctgagaagcgcatcattgcac

SEQ ID NO: 27388 - DNA, 40 bp, Artificial Sequence
  Description of Artificial Sequence: Synthetic primer
atacaatgtttaaatagttgatccaaaggcaggtgtattc

SEQ ID NO: 27389 - DNA, 40 bp, Artificial Sequence
  Description of Artificial Sequence: Synthetic primer
ttaattttgtttttattgcacctgacaaaatacagttatc

SEQ ID NO: 27390 - DNA, 40 bp, Artificial Sequence
  Description of Artificial Sequence: Synthetic primer
tgctgaatgggagataaagaccatcactagtgctctgaag

SEQ ID NO: 27391 - DNA, 40 bp, Artificial Sequence
  Description of Artificial Sequence: Synthetic primer
attttctgttatcgggggcagaaagactgaagcccaaaaa

SEQ ID NO: 27392 - DNA, 40 bp, Artificial Sequence
  Description of Artificial Sequence: Synthetic primer
ctcccggccgatctccttcaccagctgcctcactttgtcc

SEQ ID NO: 27393 - DNA, 40 bp, Artificial Sequence
  Description of Artificial Sequence: Synthetic primer
gggtaaaaagaagaacaacagcagcatgacctatgaaaag

SEQ ID NO: 27394 - DNA, 40 bp, Artificial Sequence
  Description of Artificial Sequence: Synthetic primer
accaaaattgaagaaatcttgaactttgaccgtctttacc

SEQ ID NO: 27395 - DNA, 40 bp, Artificial Sequence
  Description of Artificial Sequence: Synthetic primer
ccccggccaatcgcgctgacccaacaagcctagcgagaac

SEQ ID NO: 27396 - DNA, 40 bp, Artificial Sequence
  Description of Artificial Sequence: Synthetic primer
ggaggagtcgggtattaaaccaagaccaagagaaatttgg

SEQ ID NO: 27397 - DNA, 40 bp, Artificial Sequence
  Description of Artificial Sequence: Synthetic primer
acgtcgggcgctctttagagaggactgggacaagagttgc

SEQ ID NO: 27398 - DNA, 40 bp, Artificial Sequence
  Description of Artificial Sequence: Synthetic primer
gcgattccagtcacctcagaattgggagacatcagtaagc

SEQ ID NO: 27399 - DNA, 40 bp, Artificial Sequence
  Description of Artificial Sequence: Synthetic primer
agtcactgctgctgcttatgtctcccagcatggccttcag

SEQ ID NO: 27400 - DNA, 40 bp, Artificial Sequence
  Description of Artificial Sequence: Synthetic primer
gggaagttggaaggagattggtcacatgttcagttgtctg

SEQ ID NO: 27401 - DNA, 40 bp, Artificial Sequence
  Description of Artificial Sequence: Synthetic primer
cctggccttccagctcacggtcaaggacaccaaatgcaac

SEQ ID NO: 27402 - DNA, 40 bp, Artificial Sequence
  Description of Artificial Sequence: Synthetic primer
gtcataggaatattcttaagctcctttagcaaatccaatg

SEQ ID NO: 27403 - DNA, 40 bp, Artificial Sequence
  Description of Artificial Sequence: Synthetic primer
gcgccaagggcgccgggtgcgccatcaggttgcggcactg

SEQ ID NO: 27404 - DNA, 40 bp, Artificial Sequence
  Description of Artificial Sequence: Synthetic primer
tgaaaacaaccttttcttgtggaaaatctcctcccccttg

SEQ ID NO: 27405 - DNA, 40 bp, Artificial Sequence; identical to SEQ ID NO: 21569
  Description of Artificial Sequence: Synthetic primer

SEQ ID NO: 27406 - DNA, 40 bp, Artificial Sequence
  Description of Artificial Sequence: Synthetic primer
tttcattgtaaccaagaaggagtctttccagagatttagg

SEQ ID NO: 27407 - DNA, 40 bp, Artificial Sequence
  Description of Artificial Sequence: Synthetic primer
aaggtgagaatattgtacttggaggtcttgatgcagttac

SEQ ID NO: 27408 - DNA, 40 bp, Artificial Sequence
  Description of Artificial Sequence: Synthetic primer
ccttttttgatggctaaaatactaccaccacacaatcatc

SEQ ID NO: 27409 - DNA, 40 bp, Artificial Sequence
  Description of Artificial Sequence: Synthetic primer
aacatttgggggcaagaagctgcagaggtagatcaagagc

SEQ ID NO: 27410 - DNA, 40 bp, Artificial Sequence
  Description of Artificial Sequence: Synthetic primer
agctgctgtcgccgcggacccaggcccagaggcggctcaa

SEQ ID NO: 27411 - DNA, 40 bp, Artificial Sequence
  Description of Artificial Sequence: Synthetic primer
gcctccatctccagattccaaaaagaaatccagaggtatc

SEQ ID NO: 27412 - DNA, 40 bp, Artificial Sequence
  Description of Artificial Sequence: Synthetic primer
taaaagaaaataagatgctttacgttttctcttccttttg

SEQ ID NO: 27413 - DNA, 40 bp, Artificial Sequence
  Description of Artificial Sequence: Synthetic primer
gagcatcataagtgggggtcattgttttactatacagtcc

SEQ ID NO: 27414 - DNA, 40 bp, Artificial Sequence
  Description of Artificial Sequence: Synthetic primer
gtcaaccacttctactctcatgcaaggtttgaaaggatac

SEQ ID NO: 27415 - DNA, 40 bp, Artificial Sequence
  Description of Artificial Sequence: Synthetic primer
caatagatcaaattcatcaatggcagctcttatagctcag

SEQ ID NO: 27416 - DNA, 40 bp, Artificial Sequence
  Description of Artificial Sequence: Synthetic primer
tctttggctgccaaggatctggacctattttggagtggag

SEQ ID NO: 27417 - DNA, 40 bp, Artificial Sequence
  Description of Artificial Sequence: Synthetic primer
gatgaccttaagctaagcagtgatgaagaggagaatgaac

SEQ ID NO: 27418 - DNA, 40 bp, Artificial Sequence
  Description of Artificial Sequence: Synthetic primer
gctgcagtgtggcgatggtctggttgaagttccctacctg

SEQ ID NO: 27419 - DNA, 40 bp, Artificial Sequence
  Description of Artificial Sequence: Synthetic primer
aattgcttaagaaatatcccaatgttcatgctccgttttg

SEQ ID NO: 27420 - DNA, 40 bp, Artificial Sequence
  Description of Artificial Sequence: Synthetic primer
agttagatatttcagccatcagatccaacttctgagtttc

SEQ ID NO: 27421 - DNA, 40 bp, Artificial Sequence
  Description of Artificial Sequence: Synthetic primer
ggggccccagcagaactctcacgaccacggcttccccaac

SEQ ID NO: 27422 - DNA, 40 bp, Artificial Sequence
  Description of Artificial Sequence: Synthetic primer
gggcgacgcgccgggcccgcgggaggcgctggggctgctc

SEQ ID NO: 27423 - DNA, 40 bp, Artificial Sequence
  Description of Artificial Sequence: Synthetic primer
gattgctgcttcaggactgtggaattatttggaatgtttt

SEQ ID NO: 27424 - DNA, 40 bp, Artificial Sequence
  Description of Artificial Sequence: Synthetic primer
gtcatagagcgggaccaccaccatggaatatgtgtagcag

SEQ ID NO: 27425 - DNA, 40 bp, Artificial Sequence
  Description of Artificial Sequence: Synthetic primer
ggttcctcagcctggagccggagtgaagcctgggaaagtg

SEQ ID NO: 27426 - DNA, 40 bp, Artificial Sequence
  Description of Artificial Sequence: Synthetic primer
catctttaaattctttccttttcataagaggatcaagctg

SEQ ID NO: 27427 - DNA, 40 bp, Artificial Sequence
  Description of Artificial Sequence: Synthetic primer
ggctctgaatgtatagataggttctacatcaagagaagtg

SEQ ID NO: 27428 - DNA, 40 bp, Artificial Sequence
  Description of Artificial Sequence: Synthetic primer
ggcaagtaggctccttgcatagctgacgttgcaggcatgt

SEQ ID NO: 27429 - DNA, 40 bp, Artificial Sequence
  Description of Artificial Sequence: Synthetic primer
aaaaaagaaataaatacttataatcaattgactgctctgc

SEQ ID NO: 27430 - DNA, 40 bp, Artificial Sequence
  Description of Artificial Sequence: Synthetic primer
attccttccattgtagcagcctgaccaaagcgttcagttg

SEQ ID NO: 27431 - DNA, 40 bp, Artificial Sequence
  Description of Artificial Sequence: Synthetic primer
ctctggcttgccccgcctactatgcaagcttgtccctctc

SEQ ID NO: 27432 - DNA, 40 bp, Artificial Sequence
  Description of Artificial Sequence: Synthetic primer
aatgaccaaaacaaagcattaaaatcagaagttcagaagc

SEQ ID NO: 27433 - DNA, 40 bp, Artificial Sequence
  Description of Artificial Sequence: Synthetic primer
ggctgtcctgtgccaaagggatcaagattcccaaaagatg

SEQ ID NO: 27434 - DNA, 40 bp, Artificial Sequence
  Description of Artificial Sequence: Synthetic primer
cgcaaacgtgtgcaaaactagcaatggcgatcaacgagac

SEQ ID NO: 27435 - DNA, 40 bp, Artificial Sequence
  Description of Artificial Sequence: Synthetic primer
ccgtcagcagaggcttggctttcgagccagtgggtgtctc

SEQ ID NO: 27436 - DNA, 40 bp, Artificial Sequence
  Description of Artificial Sequence: Synthetic primer
gctcgctgtacttctcctttagcttgctatatcgctgttc

SEQ ID NO: 27437 - DNA, 40 bp, Artificial Sequence
  Description of Artificial Sequence: Synthetic primer
aaagtcctaattctgagtctctttcttcaatgatcttatc

SEQ ID NO: 27438 - DNA, 40 bp, Artificial Sequence
  Description of Artificial Sequence: Synthetic primer
cttgtatataaatagtatatagctgatcattaataaggtg

SEQ ID NO: 27439 - DNA, 40 bp, Artificial Sequence
  Description of Artificial Sequence: Synthetic primer
tactcggagaaaatcagctatgtgtatatgaagagaaact

SEQ ID NO: 27440 - DNA, 40 bp, Artificial Sequence
  Description of Artificial Sequence: Synthetic primer
aggtgatgcagagccagagagtccagacagtggcacatcg

SEQ ID NO: 27441 - DNA, 40 bp, Artificial Sequence
  Description of Artificial Sequence: Synthetic primer
gaggccggggaccttgccaaccctcccaagaagttcagag

SEQ ID NO: 27442 - DNA, 40 bp, Artificial Sequence
  Description of Artificial Sequence: Synthetic primer
taaaatgaattatttcctcaataaacccatttgctacatc

SEQ ID NO: 27443 - DNA, 40 bp, Artificial Sequence
  Description of Artificial Sequence: Synthetic primer
tgagatctactgcttctaatttcattcctacacgaaatcc

SEQ ID NO: 27444 - DNA, 40 bp, Artificial Sequence
  Description of Artificial Sequence: Synthetic primer
gacccggcccggccggagtagagcgggaagccgggagagc

SEQ ID NO: 27445 - DNA, 40 bp, Artificial Sequence
  Description of Artificial Sequence: Synthetic primer
tggtggagttctccgggctgaacagcaaattaaagataac

SEQ ID NO: 27446 - DNA, 40 bp, Artificial Sequence
  Description of Artificial Sequence: Synthetic primer
atgctgggcctgccacggaggagccaggtccctgtctgag

SEQ ID NO: 27447 - DNA, 40 bp, Artificial Sequence
  Description of Artificial Sequence: Synthetic primer
gaatataattccgctcttcaatgaatgccatgccttctgc

SEQ ID NO: 27448 - DNA, 40 bp, Artificial Sequence
  Description of Artificial Sequence: Synthetic primer
tactttgaatgttccaatgttcctgtgtctaccataaatc

SEQ ID NO: 27449 - DNA, 40 bp, Artificial Sequence
  Description of Artificial Sequence: Synthetic primer
acttccaaaggttttatggttttgtattttatttgacttc

SEQ ID NO: 27450 - DNA, 40 bp, Artificial Sequence
  Description of Artificial Sequence: Synthetic primer
tagatttcacatctagaatagtatctgtataacccacctc

SEQ ID NO: 27451 - DNA, 40 bp, Artificial Sequence
  Description of Artificial Sequence: Synthetic primer
acaactgctccaactgctgaaacacagtggcagtatcatc

SEQ ID NO: 27452 - DNA, 40 bp, Artificial Sequence
  Description of Artificial Sequence: Synthetic primer
cctctaattctgcctctacgcttttgctgggtctgaggac

SEQ ID NO: 27453 - DNA, 40 bp, Artificial Sequence
  Description of Artificial Sequence: Synthetic primer
tcgcagcccgccgagggctcggggcttcctcccgtaggtc

SEQ ID NO: 27454 - DNA, 40 bp, Artificial Sequence
  Description of Artificial Sequence: Synthetic primer
gaagcacttcttaaacagaggtcgactaaccagcaaattc

SEQ ID NO: 27455 - DNA, 40 bp, Artificial Sequence
  Description of Artificial Sequence: Synthetic primer
tggaactcacagaagattggaacaaaaagataggagatgg

SEQ ID NO: 27456 - DNA, 40 bp, Artificial Sequence
  Description of Artificial Sequence: Synthetic primer
aggccttgcctggactttgattcccccacccattccacag

SEQ ID NO: 27457 - DNA, 40 bp, Artificial Sequence
  Description of Artificial Sequence: Synthetic primer
gacgaagctggcgcagttctttttctttctcttctagagc

SEQ ID NO: 27458 - DNA, 40 bp, Artificial Sequence
  Description of Artificial Sequence: Synthetic primer
ggaagacgctgtgttgctcctgggccctttctatcagctt

SEQ ID NO: 27459 - DNA, 40 bp, Artificial Sequence
  Description of Artificial Sequence: Synthetic primer
gtatcaacgagaaaatcttcccttttgtttacttgagttc

SEQ ID NO: 27460 - DNA, 40 bp, Artificial Sequence
  Description of Artificial Sequence: Synthetic primer
tgatcagtacggctttcaataatggtgatgaacaagtagg

SEQ ID NO: 27461 - DNA, 40 bp, Artificial Sequence
  Description of Artificial Sequence: Synthetic primer
ccaggctgtccatgtattctttcttctttctcctactttc

SEQ ID NO: 27462 - DNA, 40 bp, Artificial Sequence
  Description of Artificial Sequence: Synthetic primer
tccaactataatagtaagtatgaaacttgtttctggtatc

SEQ ID NO: 27463 - DNA, 40 bp, Artificial Sequence
  Description of Artificial Sequence: Synthetic primer
ggagcagcgttccactgcgccaggacctatggcaacaaag

SEQ ID NO: 27464 - DNA, 40 bp, Artificial Sequence
  Description of Artificial Sequence: Synthetic primer
tatattgtaactttaagtccaataaaacatggcttcacac

SEQ ID NO: 27465 - DNA, 40 bp, Artificial Sequence
  Description of Artificial Sequence: Synthetic primer
accttaactttccatttattttcttcttgctcaacacttc

SEQ ID NO: 27466 - DNA, 40 bp, Artificial Sequence
  Description of Artificial Sequence: Synthetic primer
gctgccacctcagtctcttctctgtattatcatagtctgg

SEQ ID NO: 27467 - DNA, 40 bp, Artificial Sequence
  Description of Artificial Sequence: Synthetic primer
gacagttgtggcacttgaagggtttatctttgttgtgttg

SEQ ID NO: 27468 - DNA, 40 bp, Artificial Sequence
  Description of Artificial Sequence: Synthetic primer
tctttctgtaattttactgcttcatcagctattacttttg

SEQ ID NO: 27469 - DNA, 40 bp, Artificial Sequence
  Description of Artificial Sequence: Synthetic primer
ctcagggcccgggcttgccgggctgccctcttccgcagtg

SEQ ID NO: 27470 - DNA, 40 bp, Artificial Sequence
  Description of Artificial Sequence: Synthetic primer
cacctggttctgtgggcccttcctgttagcctgataatcc

SEQ ID NO: 27471 - DNA, 40 bp, Artificial Sequence
  Description of Artificial Sequence: Synthetic primer
ctaaaaaacttcatcaccattaaagatgccttgaaaaagc

SEQ ID NO: 27472 - DNA, 40 bp, Artificial Sequence
  Description of Artificial Sequence: Synthetic primer
ggtttgggatcctcttgggttttaccaaaagttacagcag

SEQ ID NO: 27473 - DNA, 40 bp, Artificial Sequence
  Description of Artificial Sequence: Synthetic primer
gccccggccaggcttgcggggagttctcttccgccgtgtg

SEQ ID NO: 27474 - DNA, 40 bp, Artificial Sequence
  Description of Artificial Sequence: Synthetic primer
cccccaagcactttctgcagtagctagagggacaggtttc

SEQ ID NO: 27475 - DNA, 40 bp, Artificial Sequence
  Description of Artificial Sequence: Synthetic primer
ggccttgaattgggagcagcagccacctggcctcactctg

SEQ ID NO: 27476 - DNA, 40 bp, Artificial Sequence
  Description of Artificial Sequence: Synthetic primer
atttttcattctgttgacctggatattattatttcttttc

SEQ ID NO: 27477 - DNA, 40 bp, Artificial Sequence
  Description of Artificial Sequence: Synthetic primer
ttttttccatgtttcattgcctgaataaaaactgtttacc

SEQ ID NO: 27478 - DNA, 40 bp, Artificial Sequence
  Description of Artificial Sequence: Synthetic primer
aggtgctggtcttgggccagttctcccacgacggctcacc

SEQ ID NO: 27479 - DNA, 40 bp, Artificial Sequence
  Description of Artificial Sequence: Synthetic primer
ggtgacagggaaagcatgggcatttttgtattgctgtcac

SEQ ID NO: 27480 - DNA, 40 bp, Artificial Sequence
  Description of Artificial Sequence: Synthetic primer
agccttccagaatggtatggaatctgagggaagatttatg

SEQ ID NO: 27481 - DNA, 40 bp, Artificial Sequence
  Description of Artificial Sequence: Synthetic primer
gctctcgccgcccacaatcctgctctggcggcttgagttc

SEQ ID NO: 27482 - DNA, 40 bp, Artificial Sequence
  Description of Artificial Sequence: Synthetic primer
gcacggcctgtgacccgaagcccggggggttcccaggagc

SEQ ID NO: 27483 - DNA, 40 bp, Artificial Sequence
  Description of Artificial Sequence: Synthetic primer
tttagatccctcaggctctcccctccagactccgcccttc

SEQ ID NO: 27484 - DNA, 40 bp, Artificial Sequence
  Description of Artificial Sequence: Synthetic primer
gttgctccaaaacctaagtacaacccatacaaacaacctg

SEQ ID NO: 27485 - DNA, 40 bp, Artificial Sequence
  Description of Artificial Sequence: Synthetic primer
cctgttctggtttgcacacagatgtggtctctgaaataag

SEQ ID NO: 27486 - DNA, 40 bp, Artificial Sequence
  Description of Artificial Sequence: Synthetic primer
acagtctgaatcatgtccttcagtaagccagcccatctac

SEQ ID NO: 27487 - DNA, 40 bp, Artificial Sequence
  Description of Artificial Sequence: Synthetic primer
agagcaatcaacaggaatggctgctcaggcacccaaaatg

SEQ ID NO: 27488 - DNA, 40 bp, Artificial Sequence
  Description of Artificial Sequence: Synthetic primer
tttggacagtgtagcacgaagcactttcccataaagtctc

SEQ ID NO: 27489 - DNA, 40 bp, Artificial Sequence
  Description of Artificial Sequence: Synthetic primer
atctgagtagcaacatcaggatgccatgccaacccagaac

SEQ ID NO: 27490 - DNA, 40 bp, Artificial Sequence
  Description of Artificial Sequence: Synthetic primer
ccctctctcctgcctcctatttttggatttctctcctttg

SEQ ID NO: 27491 - DNA, 40 bp, Artificial Sequence
  Description of Artificial Sequence: Synthetic primer
aatgaactacagaagaagagagccattattgaagatctcg

SEQ ID NO: 27492 - DNA, 40 bp, Artificial Sequence
  Description of Artificial Sequence: Synthetic primer
gctcttaacccctgcacatctccaaggaaatacaaaatac

SEQ ID NO: 27493 - DNA, 40 bp, Artificial Sequence
  Description of Artificial Sequence: Synthetic primer
agatgaccgtctggaggtaatcggtgtagcagacgaggtc

SEQ ID NO: 27494 - DNA, 40 bp, Artificial Sequence
  Description of Artificial Sequence: Synthetic primer
tgcctttgcaagttagaagatatgctaaatgatctgtcac

SEQ ID NO: 27495 - DNA, 40 bp, Artificial Sequence
  Description of Artificial Sequence: Synthetic primer
cactggttgatgatggtttagaagacaacacagcagaatg

SEQ ID NO: 27496 - DNA, 40 bp, Artificial Sequence
  Description of Artificial Sequence: Synthetic primer
agcagcctcaagaactgccacaacgacacgccgctcatgg

SEQ ID NO: 27497 - DNA, 40 bp, Artificial Sequence
  Description of Artificial Sequence: Synthetic primer
agaggttcgggattgtctttactgccttctttcaagttac

SEQ ID NO: 27498 - DNA, 40 bp, Artificial Sequence
  Description of Artificial Sequence: Synthetic primer
ccccacccatcaccccctcctcttcattccgcagcagcac

SEQ ID NO: 27499 - DNA, 40 bp, Artificial Sequence
  Description of Artificial Sequence: Synthetic primer
ccaggctccaacggccacagggactgcaagaggcagaaac

SEQ ID NO: 27500 - DNA, 40 bp, Artificial Sequence
  Description of Artificial Sequence: Synthetic primer
ccgaaggggacaggggcccggggctgttgagggccagctc

SEQ ID NO: 27501 - DNA, 40 bp, Artificial Sequence
  Description of Artificial Sequence: Synthetic primer
aaggcgctgcccacgagctttgagaacagctgggtgttgg

SEQ ID NO: 27502 - DNA, 40 bp, Artificial Sequence
  Description of Artificial Sequence: Synthetic primer
aagccttaatcaggcaccagatgccaagaaaccttcactc

SEQ ID NO: 27503 - DNA, 40 bp, Artificial Sequence
  Description of Artificial Sequence: Synthetic primer
ctttaaatatggaattctttgaaaaactcacttcatcgtc

SEQ ID NO: 27504 - DNA, 40 bp, Artificial Sequence
  Description of Artificial Sequence: Synthetic primer
gctggtggcatatctctcttcaaaatctgatcctcagtgg

SEQ ID NO: 27505 - DNA, 40 bp, Artificial Sequence
  Description of Artificial Sequence: Synthetic primer
tatgactcagtcagaagaggagcttggggcaataacatga

SEQ ID NO: 27506 - DNA, 40 bp, Artificial Sequence
  Description of Artificial Sequence: Synthetic primer
cgcccccacatgttccccaagatgctaatgaagattactg

SEQ ID NO: 27507 - DNA, 40 bp, Artificial Sequence
  Description of Artificial Sequence: Synthetic primer
tctcctccttcaccaccacgaggggctggggctggaccac

SEQ ID NO: 27508 - DNA, 40 bp, Artificial Sequence
  Description of Artificial Sequence: Synthetic primer
taagccataaagagtcaatctcttaattatatttttcatc

SEQ ID NO: 27509 - DNA, 40 bp, Artificial Sequence
  Description of Artificial Sequence: Synthetic primer
aagttcaaaagaacgagtatcgatcgcctaatgaataccc

SEQ ID NO: 27510 - DNA, 40 bp, Artificial Sequence
  Description of Artificial Sequence: Synthetic primer
cttttttcttcctttccaattgatacatttaaccctttag

SEQ ID NO: 27511 - DNA, 40 bp, Artificial Sequence
  Description of Artificial Sequence: Synthetic primer
ttactgaaagaggaatgtggtaccttgaaggcagtgatac

SEQ ID NO: 27512 - DNA, 40 bp, Artificial Sequence
  Description of Artificial Sequence: Synthetic primer
tggagaacaaagcccccacataatgatgaggtcctgaatg

SEQ ID NO: 27513 - DNA, 40 bp, Artificial Sequence
  Description of Artificial Sequence: Synthetic primer
tgaagagaatattatcatcgtctttattagtagtaagtgc

SEQ ID NO: 27514 - DNA, 40 bp, Artificial Sequence
  Description of Artificial Sequence: Synthetic primer
aaatttatatttgttatgtgtatgtttgttaatgcaactg

SEQ ID NO: 27515 - DNA, 40 bp, Artificial Sequence
  Description of Artificial Sequence: Synthetic primer
gaggaggagggtatatgggcatagccaatcagaggcttag

SEQ ID NO: 27516 - DNA, 40 bp, Artificial Sequence
  Description of Artificial Sequence: Synthetic primer
ctgctgggaattgcgcgtggctgctgggttctctcttatg

SEQ ID NO: 27517 - DNA, 40 bp, Artificial Sequence
  Description of Artificial Sequence: Synthetic primer
agatggggttgaagtcacagctgtttctatcttggctgtc

SEQ ID NO: 27518 - DNA, 40 bp, Artificial Sequence; identical to SEQ ID NO: 19796
  Description of Artificial Sequence: Synthetic primer

SEQ ID NO: 27519 - DNA, 40 bp, Artificial Sequence
  Description of Artificial Sequence: Synthetic primer
gggctacatggtcgctctcatcttgctcaattccctttgc

SEQ ID NO: 27520 - DNA, 40 bp, Artificial Sequence
  Description of Artificial Sequence: Synthetic primer
ggaattttgcatatctgtagagtgtatctaaatattcctg

SEQ ID NO: 27521 - DNA, 40 bp, Artificial Sequence
  Description of Artificial Sequence: Synthetic primer
tgcaagctcccagaacaatagtgtgcaaatttctaaaacc

SEQ ID NO: 27522 - DNA, 40 bp, Artificial Sequence
  Description of Artificial Sequence: Synthetic primer
ccagtgggcgaagcccaagcccctgtcccctacgtcctac

SEQ ID NO: 27523 - DNA, 40 bp, Artificial Sequence
  Description of Artificial Sequence: Synthetic primer
cacggtctacttctatgaattgcaggagaacctggagaag

SEQ ID NO: 27524 - DNA, 40 bp, Artificial Sequence
  Description of Artificial Sequence: Synthetic primer
gagctcctggacccagtgtcaccttggccgcccccatcac

SEQ ID NO: 27525 - DNA, 40 bp, Artificial Sequence
  Description of Artificial Sequence: Synthetic primer
ttcctatggatacatatcccattcatcatggtgacccttc

SEQ ID NO: 27526 - DNA, 40 bp, Artificial Sequence
  Description of Artificial Sequence: Synthetic primer
tgcttaggctgttccacgatcaccaggtaggggccatcag

SEQ ID NO: 27527 - DNA, 40 bp, Artificial Sequence
  Description of Artificial Sequence: Synthetic primer
gcgtcaggcagtgtgagtttgccgtttgtccttaactttc

SEQ ID NO: 27528 - DNA, 40 bp, Artificial Sequence
  Description of Artificial Sequence: Synthetic primer
gcgatgggggccgtgctgggtgcgcgtttgcaccagtgac

SEQ ID NO: 27529 - DNA, 40 bp, Artificial Sequence
  Description of Artificial Sequence: Synthetic primer
gaagatttacttgttgacttatatttctttttctctgctg

SEQ ID NO: 27530 - DNA, 40 bp, Artificial Sequence
  Description of Artificial Sequence: Synthetic primer
atgctgacaatttgacatatatacacatgcaggagaaaag

SEQ ID NO: 27531 - DNA, 40 bp, Artificial Sequence
  Description of Artificial Sequence: Synthetic primer
aggaaaatatatacatttaaattttacacaaagcctttta

SEQ ID NO: 27532 - DNA, 40 bp, Artificial Sequence
  Description of Artificial Sequence: Synthetic primer
tgtttagcctgatacctttctaatgtccatgtcaattttc

SEQ ID NO: 27533 - DNA, 40 bp, Artificial Sequence
  Description of Artificial Sequence: Synthetic primer
tgccctgcggggcacgacgctgcagtcgctgggcctgacc

SEQ ID NO: 27534 - DNA, 40 bp, Artificial Sequence
  Description of Artificial Sequence: Synthetic primer
ttgcaattgcttgtgtgggtacaattcccactgatgtttg

SEQ ID NO: 27535 - DNA, 40 bp, Artificial Sequence
  Description of Artificial Sequence: Synthetic primer
tgcggcccccgagctcgccgcctgccgcgcgctgtcgccc

SEQ ID NO: 27536 - DNA, 40 bp, Artificial Sequence
  Description of Artificial Sequence: Synthetic primer
ttaaatattttggcattgtactaataccgggaacatgaag

SEQ ID NO: 27537 - DNA, 40 bp, Artificial Sequence
  Description of Artificial Sequence: Synthetic primer
ccttagtattctagcccaattcatataatctcaacaattc

SEQ ID NO: 27538 - DNA, 40 bp, Artificial Sequence
  Description of Artificial Sequence: Synthetic primer
ggcgtcattgtgctctggtgcagggcggagtcagaattgg

SEQ ID NO: 27539 - DNA, 40 bp, Artificial Sequence
  Description of Artificial Sequence: Synthetic primer
cctgctgatttgcatgttcttatctagggatcaaatactc

SEQ ID NO: 27540 - DNA, 40 bp, Artificial Sequence
  Description of Artificial Sequence: Synthetic primer
ttggctacagcatcgtgatccaccgagcttacaagcacac

SEQ ID NO: 27541 - DNA, 40 bp, Artificial Sequence
  Description of Artificial Sequence: Synthetic primer
ggcagaggtggtggagactatggaagatttggtcacttac

SEQ ID NO: 27542 - DNA, 40 bp, Artificial Sequence
  Description of Artificial Sequence: Synthetic primer
aaatggggggaaatttcttaaatccttttcagagtgagag

SEQ ID NO: 27543 - DNA, 40 bp, Artificial Sequence
  Description of Artificial Sequence: Synthetic primer
aagccagctgctcggaaagctctggacagatgcagtgaag

SEQ ID NO: 27544 - DNA, 40 bp, Artificial Sequence
  Description of Artificial Sequence: Synthetic primer
taaaagcaaagtttattcctaaaggtgcctgcaaaatagc

SEQ ID NO: 27545 - DNA, 40 bp, Artificial Sequence
  Description of Artificial Sequence: Synthetic primer
aatggattcccagtttttgttaaattcaaagggctgttag

SEQ ID NO: 27546 - DNA, 40 bp, Artificial Sequence
  Description of Artificial Sequence: Synthetic primer
ttacttctgtactaatttccttggagtcaagtcagctaag

SEQ ID NO: 27547 - DNA, 40 bp, Artificial Sequence
  Description of Artificial Sequence: Synthetic primer
aagcagaaacagcgcatgttaaactcgaaacacttcttcc

SEQ ID NO: 27548 - DNA, 40 bp, Artificial Sequence
  Description of Artificial Sequence: Synthetic primer
tttcccacagatggctaaagcaggggtatggaacatgctg

SEQ ID NO: 27549 - DNA, 40 bp, Artificial Sequence
  Description of Artificial Sequence: Synthetic primer
ccgaagcccgcctggcccgggggactccagagctcggctg

SEQ ID NO: 27550 - DNA, 40 bp, Artificial Sequence
  Description of Artificial Sequence: Synthetic primer
tcaccaagctgcaggccaagcacgatttactcaagcagac

SEQ ID NO: 27551 - DNA, 40 bp, Artificial Sequence
  Description of Artificial Sequence: Synthetic primer
caagagcagaggaaagtctttctgcctttttataattact

SEQ ID NO: 27552 - DNA, 40 bp, Artificial Sequence
  Description of Artificial Sequence: Synthetic primer
ggattaataaatattctataataacttcataggtatcctg

SEQ ID NO: 27553 - DNA, 40 bp, Artificial Sequence
  Description of Artificial Sequence: Synthetic primer
ggtcctagccagccccccagtacagaatggaggactcagg

SEQ ID NO: 27554 - DNA, 40 bp, Artificial Sequence
  Description of Artificial Sequence: Synthetic primer
ccagcatgaggcggtgaccacccggcttgggcttctcagg

SEQ ID NO: 27555 - DNA, 40 bp, Artificial Sequence
  Description of Artificial Sequence: Synthetic primer
ggagagagaggcctaagaggctcactgccctatctccttc

SEQ ID NO: 27556 - DNA, 40 bp, Artificial Sequence
  Description of Artificial Sequence: Synthetic primer
tcgagccccgggcgtcctcggcgcagccccgggctcggcc

SEQ ID NO: 27557 - DNA, 40 bp, Artificial Sequence
  Description of Artificial Sequence: Synthetic primer
ggggatcctgcttgggcccccaagaattatattgagaaag

SEQ ID NO: 27558 - DNA, 40 bp, Artificial Sequence
  Description of Artificial Sequence: Synthetic primer
ctagcaaccacactgaagagatcgatgcctcctttcaagc

SEQ ID NO: 27559 - DNA, 40 bp, Artificial Sequence
  Description of Artificial Sequence: Synthetic primer
gcacatcgactcggccaacaagaaccgggacgaagccatc

SEQ ID NO: 27560 - DNA, 40 bp, Artificial Sequence
  Description of Artificial Sequence: Synthetic primer
aactgaaccaggccaaaggttggctccgtgaccctagtgc

SEQ ID NO: 27561 - DNA, 40 bp, Artificial Sequence
  Description of Artificial Sequence: Synthetic primer
gaccaatcgactaccgcatctgcagacgtgcgcggaaatg

SEQ ID NO: 27562 - DNA, 40 bp, Artificial Sequence
  Description of Artificial Sequence: Synthetic primer
gtgagtgcgggcttctagaactacaccgaccctcgtgtcc

SEQ ID NO: 27563 - DNA, 40 bp, Artificial Sequence
  Description of Artificial Sequence: Synthetic primer
aaataatttataaaagggtccaagggcatatacaggacac

SEQ ID NO: 27564 - DNA, 40 bp, Artificial Sequence
  Description of Artificial Sequence: Synthetic primer
cctgccccccaccacccctcttcgtacctaggcttgctca

SEQ ID NO: 27565 - DNA, 40 bp, Artificial Sequence
  Description of Artificial Sequence: Synthetic primer
gttcatataaccatggtgtcctactgctttccacctcctc

SEQ ID NO: 27566 - DNA, 40 bp, Artificial Sequence
  Description of Artificial Sequence: Synthetic primer
ccagtgcgtgcagcgggagatcaagccgcacatgcggaag

SEQ ID NO: 27567 - DNA, 40 bp, Artificial Sequence
  Description of Artificial Sequence: Synthetic primer
cttcaccatgacgctggcacgggtctgcctctgccctatg

SEQ ID NO: 27568 - DNA, 40 bp, Artificial Sequence
  Description of Artificial Sequence: Synthetic primer
cataaagaatcacagaacccataataaaaatactgggaag

SEQ ID NO: 27569 - DNA, 40 bp, Artificial Sequence
  Description of Artificial Sequence: Synthetic primer
ggaggcagcgggggaggctgcgggtgcgcagggaggcagg

SEQ ID NO: 27570 - DNA, 40 bp, Artificial Sequence
  Description of Artificial Sequence: Synthetic primer
ctttgggtttcttagaggattctttggaagatttgttgtg

SEQ ID NO: 27571 - DNA, 40 bp, Artificial Sequence
  Description of Artificial Sequence: Synthetic primer
tagctccagatacagaagccctgcatctcaagcccctggc

SEQ ID NO: 27572 - DNA, 40 bp, Artificial Sequence
  Description of Artificial Sequence: Synthetic primer
tgtgcacttgtacggcttctcgcccgtatgtatcctctcg

SEQ ID NO: 27573 - DNA, 40 bp, Artificial Sequence
  Description of Artificial Sequence: Synthetic primer
gattgtttctgcttttggaaagccatttgctaaactcatc

SEQ ID NO: 27574 - DNA, 40 bp, Artificial Sequence
  Description of Artificial Sequence: Synthetic primer
tcagggcagcccctgcagacgtctggccctggcgggtggc

SEQ ID NO: 27575 - DNA, 40 bp, Artificial Sequence
  Description of Artificial Sequence: Synthetic primer
tttgaaaatagtagctgatttttctgcaagtgttaaaaag

SEQ ID NO: 27576 - DNA, 40 bp, Artificial Sequence
  Description of Artificial Sequence: Synthetic primer
ctagggttgccagtctcgactccattcctggagccacctc

SEQ ID NO: 27577 - DNA, 40 bp, Artificial Sequence
  Description of Artificial Sequence: Synthetic primer
aaatacatgattattaataaagtttttttaaagatagttc

SEQ ID NO: 27578 - DNA, 40 bp, Artificial Sequence
  Description of Artificial Sequence: Synthetic primer
ctatatttgcaaagtgagcaatatcaaacttgctattttc

SEQ ID NO: 27579 - DNA, 40 bp, Artificial Sequence
  Description of Artificial Sequence: Synthetic primer
catgtctccaactggggtgcttcttacaaccctttcactt

SEQ ID NO: 27580 - DNA, 40 bp, Artificial Sequence
  Description of Artificial Sequence: Synthetic primer
gtttctccaaaagatgttggacacaatatctatattctgg

SEQ ID NO: 27581 - DNA, 40 bp, Artificial Sequence
  Description of Artificial Sequence: Synthetic primer
attactcaaatatctctttactctaatccgtgctggaatg

SEQ ID NO: 27582 - DNA, 40 bp, Artificial Sequence
  Description of Artificial Sequence: Synthetic primer
ggaagctgactcagtctgttcactggttgagctttgagtg

SEQ ID NO: 27583 - DNA, 40 bp, Artificial Sequence
  Description of Artificial Sequence: Synthetic primer
tggcgctgcccgagcccggcgaggcggccatggcgcggac

SEQ ID NO: 27584 - DNA, 40 bp, Artificial Sequence
  Description of Artificial Sequence: Synthetic primer
cctgggggcacgtgcggggtcgctgcaggactcggccctg

SEQ ID NO: 27585 - DNA, 40 bp, Artificial Sequence
  Description of Artificial Sequence: Synthetic primer
agaaactgatctatcttgagcactccccaaattcagaagg

SEQ ID NO: 27586 - DNA, 40 bp, Artificial Sequence
  Description of Artificial Sequence: Synthetic primer
tttttaatcctttctttacaggttacctagaccacttttg

SEQ ID NO: 27587 - DNA, 40 bp, Artificial Sequence
  Description of Artificial Sequence: Synthetic primer
gtaaatgttcttcatcacttcaccaatggcagatttttag

SEQ ID NO: 27588 - DNA, 40 bp, Artificial Sequence
  Description of Artificial Sequence: Synthetic primer
aaagaagttgtaaaccagccctttccttttggggataaag

SEQ ID NO: 27589 - DNA, 40 bp, Artificial Sequence
  Description of Artificial Sequence: Synthetic primer
agaaactagcagatagaaatggaacccgttgacttagttc

SEQ ID NO: 27590 - DNA, 40 bp, Artificial Sequence
  Description of Artificial Sequence: Synthetic primer
gcggtttctgcctctgtggaacgtacatcgtggttcatgg

SEQ ID NO: 27591 - DNA, 40 bp, Artificial Sequence
  Description of Artificial Sequence: Synthetic primer
gaatgaactttttacattagggcatttgtatttccctcac

SEQ ID NO: 27592 - DNA, 40 bp, Artificial Sequence
  Description of Artificial Sequence: Synthetic primer
aggcgaacgtctcaacctcctcctcctccatcggttggtc

SEQ ID NO: 27593 - DNA, 40 bp, Artificial Sequence
  Description of Artificial Sequence: Synthetic primer
accgcgggagcccgccccccactcatgcggcctacgctgg

SEQ ID NO: 27594 - DNA, 40 bp, Artificial Sequence
  Description of Artificial Sequence: Synthetic primer
gccttcacttctctgtattcttcctcatacttgcctaccc

SEQ ID NO: 27595 - DNA, 40 bp, Artificial Sequence
  Description of Artificial Sequence: Synthetic primer
taaggcagtcatgcaagctcattccatttcgcacattgac

SEQ ID NO: 27596 - DNA, 40 bp, Artificial Sequence
  Description of Artificial Sequence: Synthetic primer
agctaataaactccattagcttcccctaattgtataagtc

SEQ ID NO: 27597 - DNA, 40 bp, Artificial Sequence
  Description of Artificial Sequence: Synthetic primer
ccaaggaaatcgtagcatcgcgggacagggaaaatgaaag

SEQ ID NO: 27598 - DNA, 40 bp, Artificial Sequence
  Description of Artificial Sequence: Synthetic primer
ggagagactggcagaggtgcctcaggggcagggagcagac

SEQ ID NO: 27599 - DNA, 40 bp, Artificial Sequence
  Description of Artificial Sequence: Synthetic primer
atgtcctcggccatcgaaaggaagagcctggacccttcag

SEQ ID NO: 27600 - DNA, 40 bp, Artificial Sequence
  Description of Artificial Sequence: Synthetic primer
catgtaataccaagaattgttactttacaatgttccctta

SEQ ID NO: 27601 - DNA, 40 bp, Artificial Sequence
  Description of Artificial Sequence: Synthetic primer
atgattaaaacccaaagttccttggtcccagctttgacag

SEQ ID NO: 27602 - DNA, 40 bp, Artificial Sequence
  Description of Artificial Sequence: Synthetic primer
ctttctggagtctcccatgaggcttcatataaactatgtc

SEQ ID NO: 27603 - DNA, 40 bp, Artificial Sequence
  Description of Artificial Sequence: Synthetic primer
ataattggcatgtgaattatttcctgcttattcataataa

SEQ ID NO: 27604 - DNA, 40 bp, Artificial Sequence
  Description of Artificial Sequence: Synthetic primer
gacgaagggctcgatcagaaagttcttgaggaagcctgtg

SEQ ID NO: 27605 - DNA, 40 bp, Artificial Sequence
  Description of Artificial Sequence: Synthetic primer
gtgccagggcaacctggagaccctgcagaagacggtgctc

SEQ ID NO: 27606 - DNA, 40 bp, Artificial Sequence
  Description of Artificial Sequence: Synthetic primer
gctcatcgtggcctctaaggacctccagagagagattgtg

SEQ ID NO: 27607 - DNA, 40 bp, Artificial Sequence
  Description of Artificial Sequence: Synthetic primer
ttaagacacaatattgtaatccctactctaggcacttgcc

SEQ ID NO: 27608 - DNA, 40 bp, Artificial Sequence
  Description of Artificial Sequence: Synthetic primer
gagagcgagagcagttcaagtgacagcgaagaaaatgagc

SEQ ID NO: 27609 - DNA, 40 bp, Artificial Sequence
  Description of Artificial Sequence: Synthetic primer
gcggagtgggcacctcaggctggcagctctcacctcttgc

SEQ ID NO: 27610 - DNA, 40 bp, Artificial Sequence
  Description of Artificial Sequence: Synthetic primer
ctccatgtaggagctcagaaatcagctcaaacatttttat

SEQ ID NO: 27611 - DNA, 40 bp, Artificial Sequence
  Description of Artificial Sequence: Synthetic primer
gctttagtctttttaaaggaaaataacaaaactatgctgt

SEQ ID NO: 27612 - DNA, 40 bp, Artificial Sequence
  Description of Artificial Sequence: Synthetic primer
gggaggaagaagaggaggacgtggaggacctggaaaaatg

SEQ ID NO: 27613 - DNA, 40 bp, Artificial Sequence
  Description of Artificial Sequence: Synthetic primer
actgtgttggataatttcttttataatatagaaaagaact

SEQ ID NO: 27614 - DNA, 40 bp, Artificial Sequence
  Description of Artificial Sequence: Synthetic primer
tatgaaattcacacctggtactcctccccatatcctcaag

SEQ ID NO: 27615 - DNA, 40 bp, Artificial Sequence
  Description of Artificial Sequence: Synthetic primer
aagtttctttattttgatgggaagagcaaaatagcataac

SEQ ID NO: 27616 - DNA, 40 bp, Artificial Sequence
  Description of Artificial Sequence: Synthetic primer
tataggggcaccgctttttccgagtggagcgcgcatgaag

SEQ ID NO: 27617 - DNA, 40 bp, Artificial Sequence
  Description of Artificial Sequence: Synthetic primer
ttaaagcataggactatagtcagcatgctagactgagagg

SEQ ID NO: 27618 - DNA, 40 bp, Artificial Sequence
  Description of Artificial Sequence: Synthetic primer
cgaggtgcctgctctgtaaatatcaagggattacaacttt

SEQ ID NO: 27619 - DNA, 40 bp, Artificial Sequence
  Description of Artificial Sequence: Synthetic primer
tgttaataacactacagcaatcacacagtgactatagctt

SEQ ID NO: 27620 - DNA, 40 bp, Artificial Sequence
  Description of Artificial Sequence: Synthetic primer
cattacagctaaaatccagagaaaagtggccacgtggggg

SEQ ID NO: 27621 - DNA, 40 bp, Artificial Sequence
  Description of Artificial Sequence: Synthetic primer
actgggaatgctttcccccaccaaagagccgcagtgaagc

SEQ ID NO: 27622 - DNA, 40 bp, Artificial Sequence
  Description of Artificial Sequence: Synthetic primer
accggggcgcgggcagggctcggagccaccgcgcaggtcc

SEQ ID NO: 27623 - DNA, 40 bp, Artificial Sequence
  Description of Artificial Sequence: Synthetic primer
aggtgatcacaccattctcctgacttggacaattggcttc

SEQ ID NO: 27624 - DNA, 40 bp, Artificial Sequence
  Description of Artificial Sequence: Synthetic primer
tccatataactccagcccaccagaagaatgataaaatgag

SEQ ID NO: 27625 - DNA, 40 bp, Artificial Sequence
  Description of Artificial Sequence: Synthetic primer
aaggcctgcttcagtctgtgagcaccagggagcaggaaag

SEQ ID NO: 27626 - DNA, 40 bp, Artificial Sequence
  Description of Artificial Sequence: Synthetic primer
aacattttactttttttgttttttaaaagaaatgcagatg

SEQ ID NO: 27627 - DNA, 40 bp, Artificial Sequence
  Description of Artificial Sequence: Synthetic primer
ttaaccttgccttagaaacacataaattatgagatttttt

SEQ ID NO: 27628 - DNA, 40 bp, Artificial Sequence
  Description of Artificial Sequence: Synthetic primer
cgagcactgaccagataagaatgctggttttcctaaatgc

SEQ ID NO: 27629 - DNA, 40 bp, Artificial Sequence
  Description of Artificial Sequence: Synthetic primer
cgctgaccaagacagccctcagtgccaaccgcgtgaacag

SEQ ID NO: 27630 - DNA, 40 bp, Artificial Sequence
  Description of Artificial Sequence: Synthetic primer
tctggatcaccccttcctgatgtggactggatagtcactg

SEQ ID NO: 27631 - DNA, 40 bp, Artificial Sequence
  Description of Artificial Sequence: Synthetic primer
gggaggctgaagaaattggtgaggtttccaccattaaatc

SEQ ID NO: 27632 - DNA, 40 bp, Artificial Sequence
  Description of Artificial Sequence: Synthetic primer
tgcggttgtggttgtggcggcgtgggtggtggctgggaac

SEQ ID NO: 27633 - DNA, 40 bp, Artificial Sequence
  Description of Artificial Sequence: Synthetic primer
ttgtggaagacacttgctgagtgaaggaaatgaatctttg

SEQ ID NO: 27634 - DNA, 40 bp, Artificial Sequence
  Description of Artificial Sequence: Synthetic primer
actaccaagagagttcctgcattcatcatagggatcttag

SEQ ID NO: 27635 - DNA, 40 bp, Artificial Sequence
  Description of Artificial Sequence: Synthetic primer
gcagctcctggcgcccgggaacactcacggctccttcctc

SEQ ID NO: 27636 - DNA, 40 bp, Artificial Sequence
  Description of Artificial Sequence: Synthetic primer
ctaaatcccatacatccttttaacagcaattttcattatt

SEQ ID NO: 27637 - DNA, 40 bp, Artificial Sequence
  Description of Artificial Sequence: Synthetic primer
cttctaagaggatcttcaaaagtctattattagctttctg

SEQ ID NO: 27638 - DNA, 40 bp, Artificial Sequence
  Description of Artificial Sequence: Synthetic primer
ccccgccgtcactgtgtgcaacaacaacccgctgcgcttc

SEQ ID NO: 27639 - DNA, 40 bp, Artificial Sequence
  Description of Artificial Sequence: Synthetic primer
gcgtgcgggcgaggccgcaggcacccgaccgccccgtcta

SEQ ID NO: 27640 - DNA, 40 bp, Artificial Sequence
  Description of Artificial Sequence: Synthetic primer
caacttgaaggcatgagtcccagatgctttattgccttcc

SEQ ID NO: 27641 - DNA, 40 bp, Artificial Sequence
  Description of Artificial Sequence: Synthetic primer
cccatgcttgccatgccatcttgtccctgcctgccggggg

SEQ ID NO: 27642 - DNA, 40 bp, Artificial Sequence
  Description of Artificial Sequence: Synthetic primer
tactactattattaacacctagtctagggatgcacagcag

SEQ ID NO: 27643 - DNA, 40 bp, Artificial Sequence
  Description of Artificial Sequence: Synthetic primer
gttgtcattcaacaagaaaccactggcaccccacgctcag

SEQ ID NO: 27644 - DNA, 40 bp, Artificial Sequence
  Description of Artificial Sequence: Synthetic primer
cgaaccttcttggttaagctttaacatcttattctcatgc

SEQ ID NO: 27645 - DNA, 40 bp, Artificial Sequence
  Description of Artificial Sequence: Synthetic primer
tactcatgtatgttctcacatctatctcagagggactcac

SEQ ID NO: 27646 - DNA, 40 bp, Artificial Sequence
  Description of Artificial Sequence: Synthetic primer
ttgtctcttccagtgtttggacaagactctttcttagctg

SEQ ID NO: 27647 - DNA, 40 bp, Artificial Sequence
  Description of Artificial Sequence: Synthetic primer
ccccagatggaagtcagagtgggctgcaaaagatgcagat

SEQ ID NO: 27648 - DNA, 40 bp, Artificial Sequence
  Description of Artificial Sequence: Synthetic primer
ctgatatgttctgacagggctgaggctcgcaggaagttgg

SEQ ID NO: 27649 - DNA, 40 bp, Artificial Sequence
  Description of Artificial Sequence: Synthetic primer
actgaatgagtttctagaactggaacggcataataataac

SEQ ID NO: 27650 - DNA, 40 bp, Artificial Sequence
  Description of Artificial Sequence: Synthetic primer
tgtgtatgacgccactctgaagagtaggtgagcgctttgc

SEQ ID NO: 27651 - DNA, 40 bp, Artificial Sequence
  Description of Artificial Sequence: Synthetic primer
aggcagcagccagcaggctgggggagcagtgagggcaggg

SEQ ID NO: 27652 - DNA, 40 bp, Artificial Sequence
  Description of Artificial Sequence: Synthetic primer
cctctctccttttctgactgggacagagattatgttcacc

SEQ ID NO: 27653 - DNA, 40 bp, Artificial Sequence
  Description of Artificial Sequence: Synthetic primer
agcatgaccactgggactttgtgtgtagagtcagctcctg

SEQ ID NO: 27654 - DNA, 40 bp, Artificial Sequence
  Description of Artificial Sequence: Synthetic primer
cctaccttccccagtattccttcatgatcactgctacctg

SEQ ID NO: 27655 - DNA, 40 bp, Artificial Sequence
  Description of Artificial Sequence: Synthetic primer
tgcgctgtgacttctcactggcagacttgggttggctttg

SEQ ID NO: 27656 - DNA, 40 bp, Artificial Sequence
  Description of Artificial Sequence: Synthetic primer
tttaaaaaaagaaagaagcatcaaggagagaagccccaca

SEQ ID NO: 27657 - DNA, 40 bp, Artificial Sequence
  Description of Artificial Sequence: Synthetic primer
tgagagatgcagtcagcaacactacaaatcaactggaaag

SEQ ID NO: 27658 - DNA, 40 bp, Artificial Sequence
  Description of Artificial Sequence: Synthetic primer
atctcagcctccaaggctgtgggctggggagccactgtca

SEQ ID NO: 27659 - DNA, 40 bp, Artificial Sequence
  Description of Artificial Sequence: Synthetic primer
cgaccggggaccccccgccagcgtggcggcgctcaggtcc

SEQ ID NO: 27660 - DNA, 40 bp, Artificial Sequence
  Description of Artificial Sequence: Synthetic primer
tgtaattctatatgaacgtttagagtactacatggttgac

SEQ ID NO: 27661 - DNA, 40 bp, Artificial Sequence
  Description of Artificial Sequence: Synthetic primer
agaattgctgcgatctggtagttcccctaacctcaatatg

SEQ ID NO: 27662 - DNA, 40 bp, Artificial Sequence
  Description of Artificial Sequence: Synthetic primer
aaccaagtggcaggcaaatcccagtgaacacagtaagaag

SEQ ID NO: 27663 - DNA, 40 bp, Artificial Sequence
  Description of Artificial Sequence: Synthetic primer
tggaacgagaactacgggcgggcggcctgcagggacatgg

SEQ ID NO: 27664 - DNA, 40 bp, Artificial Sequence
  Description of Artificial Sequence: Synthetic primer
gagattctgggaacttgcaaaatgctagggcagatgactg

SEQ ID NO: 27665 - DNA, 40 bp, Artificial Sequence
  Description of Artificial Sequence: Synthetic primer
ttacatcacaatccggcggaaatcagagctggctgccaat

SEQ ID NO: 27666 - DNA, 40 bp, Artificial Sequence
  Description of Artificial Sequence: Synthetic primer
cgggcaaagagagagccccaccaggcagcaccaccagctc

SEQ ID NO: 27667 - DNA, 40 bp, Artificial Sequence
  Description of Artificial Sequence: Synthetic primer
gcgggagggcagcgagacgaggggttgggtcgctccaagg

SEQ ID NO: 27668 - DNA, 40 bp, Artificial Sequence
  Description of Artificial Sequence: Synthetic primer
cacaatgactgtcttctttaatttcattgactttctcttc

SEQ ID NO: 27669 - DNA, 40 bp, Artificial Sequence
  Description of Artificial Sequence: Synthetic primer
tccttgctagaaggtgaggaagctggccaagagcaagtcg

SEQ ID NO: 27670 - DNA, 40 bp, Artificial Sequence
  Description of Artificial Sequence: Synthetic primer
aacttaaaagaatgccagaaaacccagatcaacactttcc

SEQ ID NO: 27671 - DNA, 40 bp, Artificial Sequence
  Description of Artificial Sequence: Synthetic primer
gttggttacctggcaaagctccaattattccacccactgc

SEQ ID NO: 27672 - DNA, 40 bp, Artificial Sequence
  Description of Artificial Sequence: Synthetic primer
atgtccggggatgagctcacagagctgctggcagggatca

SEQ ID NO: 27673 - DNA, 40 bp, Artificial Sequence
  Description of Artificial Sequence: Synthetic primer
gggcatgctcgggaccccccgcggctccagcccagacgcc

SEQ ID NO: 27674 - DNA, 40 bp, Artificial Sequence
  Description of Artificial Sequence: Synthetic primer
tcaggagaaaattcaagcattgcaaacggcatgccctgac

SEQ ID NO: 27675 - DNA, 40 bp, Artificial Sequence
  Description of Artificial Sequence: Synthetic primer
gtgtgccatggttgcccaccagtgaccccagcctgaggag

SEQ ID NO: 27676 - DNA, 40 bp, Artificial Sequence
  Description of Artificial Sequence: Synthetic primer
tcctgctggttccgcccacttggcccaagccgctggtgcc

SEQ ID NO: 27677 - DNA, 40 bp, Artificial Sequence
  Description of Artificial Sequence: Synthetic primer
ttggcctccactatgtggataataaaggatttcctacctg

SEQ ID NO: 27678 - DNA, 40 bp, Artificial Sequence
  Description of Artificial Sequence: Synthetic primer
gcccatgaaccaactgaaaactccaagaaccctctgtctg

SEQ ID NO: 27679 - DNA, 40 bp, Artificial Sequence
  Description of Artificial Sequence: Synthetic primer
tgtgctactaagcatttgatgactagttaatttcttgcag

SEQ ID NO: 27680 - DNA, 40 bp, Artificial Sequence
  Description of Artificial Sequence: Synthetic primer
ctacaataatgagaactctacatagtggagaaataaccag

SEQ ID NO: 27681 - DNA, 40 bp, Artificial Sequence
  Description of Artificial Sequence: Synthetic primer
ccccggacgggtgctgctggagccgctgctcccccgcggc

SEQ ID NO: 27682 - DNA, 40 bp, Artificial Sequence
  Description of Artificial Sequence: Synthetic primer
ttatcagacacatatgaaaatccaaaatgttttattttat

SEQ ID NO: 27683 - DNA, 40 bp, Artificial Sequence
  Description of Artificial Sequence: Synthetic primer
gatgagagagcgaggaggccatcattccgtcccgaacgtc

SEQ ID NO: 27684 - DNA, 40 bp, Artificial Sequence
  Description of Artificial Sequence: Synthetic primer
cctccacgggctcatctggcatcttggcaaacctcatctc

SEQ ID NO: 27685 - DNA, 40 bp, Artificial Sequence
  Description of Artificial Sequence: Synthetic primer
caatcagctagaaaagaccttgaagcagccccatctctgg

SEQ ID NO: 27686 - DNA, 40 bp, Artificial Sequence
  Description of Artificial Sequence: Synthetic primer
tacaagaaaactccctgtgggtgcaatgagtctggaaaag

SEQ ID NO: 27687 - DNA, 40 bp, Artificial Sequence
  Description of Artificial Sequence: Synthetic primer
gcggcgcgaggttgggggcggtccctgcgccgccaggggg

SEQ ID NO: 27688 - DNA, 40 bp, Artificial Sequence
  Description of Artificial Sequence: Synthetic primer
ctaactttagctcaagtggagttttcaccgtggtcatttc

SEQ ID NO: 27689 - DNA, 40 bp, Artificial Sequence
  Description of Artificial Sequence: Synthetic primer
cttactcagatgaaattgagtacatcatctgtaccaacac

SEQ ID NO: 27690 - DNA, 40 bp, Artificial Sequence
  Description of Artificial Sequence: Synthetic primer
tcagacctggcagcagagggaggcggatctgctggaggac

SEQ ID NO: 27691 - DNA, 40 bp, Artificial Sequence
  Description of Artificial Sequence: Synthetic primer
catgaagattggggtgtggaagggttaccagttggggaag

SEQ ID NO: 27692 - DNA, 40 bp, Artificial Sequence
  Description of Artificial Sequence: Synthetic primer
gagattatttgacttaactgtgagcgcccttttatttatc

SEQ ID NO: 27693 - DNA, 40 bp, Artificial Sequence
  Description of Artificial Sequence: Synthetic primer
ttctccaattgggaagttgactccagttccctgggttatg

SEQ ID NO: 27694 - DNA, 40 bp, Artificial Sequence
  Description of Artificial Sequence: Synthetic primer
gcagctctcagggaactagtatcaatagagatgattttac

SEQ ID NO: 27695 - DNA, 40 bp, Artificial Sequence
  Description of Artificial Sequence: Synthetic primer
tgctgttgttaaaaatatcccggctttgcctttatgaaac

SEQ ID NO: 27696 - DNA, 40 bp, Artificial Sequence
  Description of Artificial Sequence: Synthetic primer
ttaataaataatgaacactgttaggagcaaattcccagtg

SEQ ID NO: 27697 - DNA, 40 bp, Artificial Sequence
  Description of Artificial Sequence: Synthetic primer
tccagccttgggtcagccgtccccagaggtctttccagtg

SEQ ID NO: 27698 - DNA, 40 bp, Artificial Sequence
  Description of Artificial Sequence: Synthetic primer
gcgcctgacgcttgctgctgccctgggctcaccccaggtg

SEQ ID NO: 27699 - DNA, 40 bp, Artificial Sequence
  Description of Artificial Sequence: Synthetic primer
tgaaggaagatggaatgagtgacagaaagctacaaacgag

SEQ ID NO: 27700 - DNA, 40 bp, Artificial Sequence
  Description of Artificial Sequence: Synthetic primer
tgagaaacagatttctgctcacttcatgggctggcctgga

SEQ ID NO: 27701 - DNA, 40 bp, Artificial Sequence
  Description of Artificial Sequence: Synthetic primer
ccaaccattcaggtctaaggtacatctgccgttgccattg

SEQ ID NO: 27702 - DNA, 40 bp, Artificial Sequence
  Description of Artificial Sequence: Synthetic primer
gctaaaaaagaaactgaagatgcttgagagaatccctgag

SEQ ID NO: 27703 - DNA, 40 bp, Artificial Sequence
  Description of Artificial Sequence: Synthetic primer
atcaatcagccagtgagggtcaacgtcaagcgggagtatg

SEQ ID NO: 27704 - DNA, 40 bp, Artificial Sequence
  Description of Artificial Sequence: Synthetic primer
acagttttcactttgaaaaactgcttccgtggattaaaag

SEQ ID NO: 27705 - DNA, 40 bp, Artificial Sequence
  Description of Artificial Sequence: Synthetic primer
ttgcttcatttcaccttgggacagtgttggtgaagacaag

SEQ ID NO: 27706 - DNA, 40 bp, Artificial Sequence
  Description of Artificial Sequence: Synthetic primer
tgggcaaggctgctgggggagccaccagagggctgtgttg

SEQ ID NO: 27707 - DNA, 40 bp, Artificial Sequence
  Description of Artificial Sequence: Synthetic primer
ctgagggcgtctgtgacaatgacactgtgcccagtgtcag

SEQ ID NO: 27708 - DNA, 40 bp, Artificial Sequence
  Description of Artificial Sequence: Synthetic primer
ggaagtgagccctctggaggtagttggagccaggagtgtg

SEQ ID NO: 27709 - DNA, 40 bp, Artificial Sequence
  Description of Artificial Sequence: Synthetic primer
cttcgcatcttgcctttctggtctgggttggaaagaacac

SEQ ID NO: 27710 - DNA, 40 bp, Artificial Sequence
  Description of Artificial Sequence: Synthetic primer
aagtgacacggtgacactgttaatcgtttggtttgttctg

SEQ ID NO: 27711 - DNA, 40 bp, Artificial Sequence
  Description of Artificial Sequence: Synthetic primer
cttgcttactatattcctttataataatgctagccacttc

SEQ ID NO: 27712 - DNA, 40 bp, Artificial Sequence
  Description of Artificial Sequence: Synthetic primer
ctgcgtcagttccgtgggcgggttgccctcagccatcagc

SEQ ID NO: 27713 - DNA, 40 bp, Artificial Sequence
  Description of Artificial Sequence: Synthetic primer
cagcattggcaaagtacacggtggccgaggagcggaagac

SEQ ID NO: 27714 - DNA, 40 bp, Artificial Sequence
  Description of Artificial Sequence: Synthetic primer
cactgagcctaaactggctaataatccattaaacacaatc

SEQ ID NO: 27715 - DNA, 40 bp, Artificial Sequence
  Description of Artificial Sequence: Synthetic primer
acaactgtttgccgtagcaacacagtgtctgtggagagaa

SEQ ID NO: 27716 - DNA, 40 bp, Artificial Sequence
  Description of Artificial Sequence: Synthetic primer
cgcccccccagcggcgctgcctcctccaaatgagcgattc

SEQ ID NO: 27717 - DNA, 40 bp, Artificial Sequence
  Description of Artificial Sequence: Synthetic primer
gcctttttcttctgttttgatgaagctgattggttttctc

SEQ ID NO: 27718 - DNA, 40 bp, Artificial Sequence
  Description of Artificial Sequence: Synthetic primer
tttgcttgtgcaaaagggaatagtgccgtggaggtgtgtg

SEQ ID NO: 27719 - DNA, 40 bp, Artificial Sequence
  Description of Artificial Sequence: Synthetic primer
tcagagtcttcagctgcctctccaggtctgacttctgttc

SEQ ID NO: 27720 - DNA, 40 bp, Artificial Sequence
  Description of Artificial Sequence: Synthetic primer
tgctaacgggccacgacttcacaaaccccacccaggaaag

SEQ ID NO: 27721 - DNA, 40 bp, Artificial Sequence
  Description of Artificial Sequence: Synthetic primer
agcacagtgggaaactccagctcacacaacactgcttctc

SEQ ID NO: 27722 - DNA, 40 bp, Artificial Sequence
  Description of Artificial Sequence: Synthetic primer
ggcccatctctgaggatcggcactcaccccacggtggggg

SEQ ID NO: 27723 - DNA, 40 bp, Artificial Sequence
  Description of Artificial Sequence: Synthetic primer
acaagacagaggaggacatcaagaaggcgcggagaaagtc

SEQ ID NO: 27724 - DNA, 40 bp, Artificial Sequence
  Description of Artificial Sequence: Synthetic primer
ccagttgcagaaggcatgaatgaaatctggcttcgttgtg

SEQ ID NO: 27725 - DNA, 40 bp, Artificial Sequence
  Description of Artificial Sequence: Synthetic primer
ttcttctgaagccgatggcctctcgagagcttggtggcac

SEQ ID NO: 27726 - DNA, 40 bp, Artificial Sequence
  Description of Artificial Sequence: Synthetic primer
ctttttgttttaattttaattctataacttgagatctttc

SEQ ID NO: 27727 - DNA, 40 bp, Artificial Sequence
  Description of Artificial Sequence: Synthetic primer
taccttccatccaacaggtaaatgcctcacgacggtggtt

SEQ ID NO: 27728 - DNA, 40 bp, Artificial Sequence
  Description of Artificial Sequence: Synthetic primer
gaagccgacagagagctgtttggaaacttctccttcacac

SEQ ID NO: 27729 - DNA, 40 bp, Artificial Sequence
  Description of Artificial Sequence: Synthetic primer
cagttcatcagctggccgcgtgtgatgtagaccccagagc

SEQ ID NO: 27730 - DNA, 40 bp, Artificial Sequence
  Description of Artificial Sequence: Synthetic primer
cttgaactggaaagaacctttggatccaaatggaatcatc

SEQ ID NO: 27731 - DNA, 40 bp, Artificial Sequence
  Description of Artificial Sequence: Synthetic primer
gcagcacctcagcctgcgccctctggaggttctctgttcc

SEQ ID NO: 27732 - DNA, 40 bp, Artificial Sequence
  Description of Artificial Sequence: Synthetic primer
tggttatcctctgattccgaaatggcgggatctcaaccac

SEQ ID NO: 27733 - DNA, 40 bp, Artificial Sequence
  Description of Artificial Sequence: Synthetic primer
cccagctgcctcgagagccagcccgctattcgcaatcagg

SEQ ID NO: 27734 - DNA, 40 bp, Artificial Sequence
  Description of Artificial Sequence: Synthetic primer
tccgagccactccctcccccggacccaccccctccagctc

SEQ ID NO: 27735 - DNA, 40 bp, Artificial Sequence
  Description of Artificial Sequence: Synthetic primer
gagcagaggagaagcggccggacgccgccagaggaagctg

SEQ ID NO: 27736 - DNA, 40 bp, Artificial Sequence
  Description of Artificial Sequence: Synthetic primer
tgcatgatgctgtccgactggccactgggtggccgaggtg

SEQ ID NO: 27737 - DNA, 40 bp, Artificial Sequence
  Description of Artificial Sequence: Synthetic primer
ttaattactgaaaagtgactcaaccaaaaagcacataacc

SEQ ID NO: 27738 - DNA, 40 bp, Artificial Sequence
  Description of Artificial Sequence: Synthetic primer
aagcaaccaatgtttgcactcgatttgaagactctccatc

SEQ ID NO: 27739 - DNA, 40 bp, Artificial Sequence
  Description of Artificial Sequence: Synthetic primer
ctgggttaattaaaaaggaagagcatcatgtctcagaagc

SEQ ID NO: 27740 - DNA, 40 bp, Artificial Sequence
  Description of Artificial Sequence: Synthetic primer
acaaatatccctttggctccgtccagcggtcaagctccag

SEQ ID NO: 27741 - DNA, 40 bp, Artificial Sequence
  Description of Artificial Sequence: Synthetic primer
gagagggggctggggcataaggaggggcctgcctgtgaag

SEQ ID NO: 27742 - DNA, 40 bp, Artificial Sequence
  Description of Artificial Sequence: Synthetic primer
ctgactgattatttcagtaacttcttctgaggaacattca

SEQ ID NO: 27743 - DNA, 40 bp, Artificial Sequence
  Description of Artificial Sequence: Synthetic primer
tagtttgggcagatttctggttcttcttctcaaagacttg

SEQ ID NO: 27744 - DNA, 40 bp, Artificial Sequence
  Description of Artificial Sequence: Synthetic primer
atagcaactgatgcctcccagccaccaggagcatcttacc

SEQ ID NO: 27745 - DNA, 40 bp, Artificial Sequence
  Description of Artificial Sequence: Synthetic primer
aagaaagtagccataaagatcatcagcaaaaggaagtttg

SEQ ID NO: 27746 - DNA, 40 bp, Artificial Sequence
  Description of Artificial Sequence: Synthetic primer
cttaaagaaataccccaagtacccctgggggagagaaatc

SEQ ID NO: 27747 - DNA, 40 bp, Artificial Sequence
  Description of Artificial Sequence: Synthetic primer
tctgcgcggacccacgcagtcctcagaactaagcagactc

SEQ ID NO: 27748 - DNA, 40 bp, Artificial Sequence
  Description of Artificial Sequence: Synthetic primer
agtgggcgggggtgttgggggagaagtttcgggggctgtc

SEQ ID NO: 27749 - DNA, 40 bp, Artificial Sequence
  Description of Artificial Sequence: Synthetic primer
cttctcactctccaagtaaccctgaattaggcccagaatg

SEQ ID NO: 27750 - DNA, 40 bp, Artificial Sequence
  Description of Artificial Sequence: Synthetic primer
caaatacacagacaaactccagaaagcaagaatgctactc

SEQ ID NO: 27751 - DNA, 40 bp, Artificial Sequence
  Description of Artificial Sequence: Synthetic primer
tcacccatctcatcaaaaattattgcattttcccccaaac

SEQ ID NO: 27752 - DNA, 40 bp, Artificial Sequence
  Description of Artificial Sequence: Synthetic primer
tcctagagtgtcctggaaatcacagcaacccattgaaaac

SEQ ID NO: 27753 - DNA, 40 bp, Artificial Sequence
  Description of Artificial Sequence: Synthetic primer
agctgtgaattcttggatacacgtcttactttctagattc

SEQ ID NO: 27754 - DNA, 40 bp, Artificial Sequence
  Description of Artificial Sequence: Synthetic primer
cattttcctgcttcaagtgagctatctctgcctccatctg

SEQ ID NO: 27755 - DNA, 40 bp, Artificial Sequence
  Description of Artificial Sequence: Synthetic primer
ttaaagccagagaatgttttactgtcatctcaagaagagg

SEQ ID NO: 27756 - DNA, 40 bp, Artificial Sequence
  Description of Artificial Sequence: Synthetic primer
cacgggaggccgtgcagggagggccgggggcgggccgagc

SEQ ID NO: 27757 - DNA, 40 bp, Artificial Sequence
  Description of Artificial Sequence: Synthetic primer
cctaaagttcattttagagaaaggcccagaaaaacgtatc

SEQ ID NO: 27758 - DNA, 40 bp, Artificial Sequence
  Description of Artificial Sequence: Synthetic primer
gatctcacatagtaacattattgctggtataactgggatg

SEQ ID NO: 27759 - DNA, 40 bp, Artificial Sequence
  Description of Artificial Sequence: Synthetic primer
tttgtatgattctgattggaatccccaagtagatcttcag

SEQ ID NO: 27760 - DNA, 40 bp, Artificial Sequence
  Description of Artificial Sequence: Synthetic primer
tctgaatcttgtggtctgaggaaagaagagaaggaaccac

SEQ ID NO: 27761 - DNA, 40 bp, Artificial Sequence
  Description of Artificial Sequence: Synthetic primer
aaatttttaaaaagatttatctggatttagagaattttag

SEQ ID NO: 27762 - DNA, 40 bp, Artificial Sequence
  Description of Artificial Sequence: Synthetic primer
tgtagcgtcgccgttactccgaggagataccagtcggtag

SEQ ID NO: 27763 - DNA, 40 bp, Artificial Sequence
  Description of Artificial Sequence: Synthetic primer
ctccgcggccggcgggggaactccccagcccaccgccacc

SEQ ID NO: 27764 - DNA, 40 bp, Artificial Sequence
  Description of Artificial Sequence: Synthetic primer
ggctgatcattgatgcgggctgtagtgacatggtgtgctc

SEQ ID NO: 27765 - DNA, 40 bp, Artificial Sequence
  Description of Artificial Sequence: Synthetic primer
ttattacgcttattagctccgtcagccaaatgtgcccttg

SEQ ID NO: 27766 - DNA, 40 bp, Artificial Sequence
  Description of Artificial Sequence: Synthetic primer
cctccgcagggctccagccacagcgctggctcagctcagc

SEQ ID NO: 27767 - DNA, 40 bp, Artificial Sequence
  Description of Artificial Sequence: Synthetic primer
aatcctgatttaaacgtcagtagataagtgtattttattg

SEQ ID NO: 27768 - DNA, 40 bp, Artificial Sequence
  Description of Artificial Sequence: Synthetic primer
tgtgagggctagaaaactcgtgaatgtctctataatttgg

SEQ ID NO: 27769 - DNA, 40 bp, Artificial Sequence
  Description of Artificial Sequence: Synthetic primer
ttgtttgttcttctattcctttgttaatcagatgtaatcc

SEQ ID NO: 27770 - DNA, 40 bp, Artificial Sequence
  Description of Artificial Sequence: Synthetic primer
aacagctatcgaaagttagcacagcttgtctgtggtgctg

SEQ ID NO: 27771 - DNA, 40 bp, Artificial Sequence
  Description of Artificial Sequence: Synthetic primer
gattgtgcagtgccctgggtccctgcctactcctgggctc

SEQ ID NO: 27772 - DNA, 40 bp, Artificial Sequence
  Description of Artificial Sequence: Synthetic primer
gtataatgtagaggttgagaaatcagcagacaaattcaag

SEQ ID NO: 27773 - DNA, 40 bp, Artificial Sequence
  Description of Artificial Sequence: Synthetic primer
taacccctgttcgttatcaccctagactgcctccctaatg

SEQ ID NO: 27774 - DNA, 40 bp, Artificial Sequence
  Description of Artificial Sequence: Synthetic primer
gcagcggctcctgcagcatgtccacccggtccggctgctc

SEQ ID NO: 27775 - DNA, 40 bp, Artificial Sequence
  Description of Artificial Sequence: Synthetic primer
aatctcatgggttagttaaccaggtgcaatacagcacacc

SEQ ID NO: 27776 - DNA, 40 bp, Artificial Sequence
  Description of Artificial Sequence: Synthetic primer
agtctctggcggagcagatgaggaagatcgccttggagtc

SEQ ID NO: 27777 - DNA, 40 bp, Artificial Sequence
  Description of Artificial Sequence: Synthetic primer
gtactgtcacatcaaaagcgtggctccccaaagtggaagg

SEQ ID NO: 27778 - DNA, 40 bp, Artificial Sequence
  Description of Artificial Sequence: Synthetic primer
ccttgaagacatgaggagcaacaacgttgaggactgcaag

SEQ ID NO: 27779 - DNA, 40 bp, Artificial Sequence
  Description of Artificial Sequence: Synthetic primer
ggtttcggtcggccgtcagagtatccattgcaatttccag

SEQ ID NO: 27780 - DNA, 40 bp, Artificial Sequence
  Description of Artificial Sequence: Synthetic primer
gaacaacaacatggacgtcgagtccaggacgatggctacc

SEQ ID NO: 27781 - DNA, 40 bp, Artificial Sequence
  Description of Artificial Sequence: Synthetic primer
catacactgctggtgttaccatatgaaaggaaataaagtc

SEQ ID NO: 27782 - DNA, 40 bp, Artificial Sequence
  Description of Artificial Sequence: Synthetic primer
cacttaccagcacattgaccgctggctgctggccgagatg

SEQ ID NO: 27783 - DNA, 40 bp, Artificial Sequence
  Description of Artificial Sequence: Synthetic primer
tgcaagacatgcagtgcctgtagagtccaaggcagaaatg

SEQ ID NO: 27784 - DNA, 40 bp, Artificial Sequence
  Description of Artificial Sequence: Synthetic primer
tcctctgatgttctcggagatggtttaggtggttacatgc

SEQ ID NO: 27785 - DNA, 40 bp, Artificial Sequence
  Description of Artificial Sequence: Synthetic primer
aagagtcaggctgacagggaagaagagatgctgattcaag

SEQ ID NO: 27786 - DNA, 40 bp, Artificial Sequence
  Description of Artificial Sequence: Synthetic primer
cgaacctgctcgcgcagcccggagcagctcggggcagccg

SEQ ID NO: 27787 - DNA, 40 bp, Artificial Sequence
  Description of Artificial Sequence: Synthetic primer
tctccttctcgtagctggcgctgctgtcgtagggcgtgtc

SEQ ID NO: 27788 - DNA, 40 bp, Artificial Sequence
  Description of Artificial Sequence: Synthetic primer
caagcataggggctcagcagccaccagcaacaacaattcc

SEQ ID NO: 27789 - DNA, 40 bp, Artificial Sequence
  Description of Artificial Sequence: Synthetic primer
gagggaaataattgttggtaatgagatgtgatgtttctcc

SEQ ID NO: 27790 - DNA, 40 bp, Artificial Sequence
  Description of Artificial Sequence: Synthetic primer
ctttagaagagtgtatttatgtatatacacttatctacac

SEQ ID NO: 27791 - DNA, 40 bp, Artificial Sequence
  Description of Artificial Sequence: Synthetic primer
ccaggccactcttgccagccacgccttctgctccccactc

SEQ ID NO: 27792 - DNA, 40 bp, Artificial Sequence
  Description of Artificial Sequence: Synthetic primer
taaacacccatgctactggggtggtcctgtcggaatgaac

SEQ ID NO: 27793 - DNA, 40 bp, Artificial Sequence
  Description of Artificial Sequence: Synthetic primer
atcctccagtttcttcttctcgtcctggtgcagtttcttc

SEQ ID NO: 27794 - DNA, 40 bp, Artificial Sequence
  Description of Artificial Sequence: Synthetic primer
gaagttgcagaagccagtatccacactcggaggcacaaac

SEQ ID NO: 27795 - DNA, 40 bp, Artificial Sequence
  Description of Artificial Sequence: Synthetic primer
ctccctttctccagaggcagaacacatgttttcagagaag

SEQ ID NO: 27796 - DNA, 40 bp, Artificial Sequence
  Description of Artificial Sequence: Synthetic primer
actggcaaccaaaggttgcaccaacaaccgcttggaatgc

SEQ ID NO: 27797 - DNA, 40 bp, Artificial Sequence
  Description of Artificial Sequence: Synthetic primer
ccactctgttttctaaacatttcacatattctttcttctt

SEQ ID NO: 27798 - DNA, 40 bp, Artificial Sequence
  Description of Artificial Sequence: Synthetic primer
gaaaacagattaaataaatatatctgctctcaaaccctac

SEQ ID NO: 27799 - DNA, 40 bp, Artificial Sequence
  Description of Artificial Sequence: Synthetic primer
ggattctcttgccaagcgctgcgtctgtgtgtccaatacc

SEQ ID NO: 27800 - DNA, 40 bp, Artificial Sequence
  Description of Artificial Sequence: Synthetic primer
ttctcaatgtaaacttagggttccatgtcttcctcaatgc

SEQ ID NO: 27801 - DNA, 40 bp, Artificial Sequence
  Description of Artificial Sequence: Synthetic primer
gccagaacctttattggagagtgacaggcccgatttcagc

SEQ ID NO: 27802 - DNA, 40 bp, Artificial Sequence
  Description of Artificial Sequence: Synthetic primer
cctcatttcgtgatacttctctcaaagacgttttagtgct

SEQ ID NO: 27803 - DNA, 40 bp, Artificial Sequence
  Description of Artificial Sequence: Synthetic primer
tcagtgcattgccacagggagagatgctgtgcataacaag

SEQ ID NO: 27804 - DNA, 40 bp, Artificial Sequence
  Description of Artificial Sequence: Synthetic primer
ccacctcagtagcaccaccagcagccaccagcacttcctc

SEQ ID NO: 27805 - DNA, 40 bp, Artificial Sequence
  Description of Artificial Sequence: Synthetic primer
attttctcaaagtactgctgcgccctgtccgcctctttgc

SEQ ID NO: 27806 - DNA, 40 bp, Artificial Sequence
  Description of Artificial Sequence: Synthetic primer
ttttgattcttctgtgaatgcctattattgctgagttgag

SEQ ID NO: 27807 - DNA, 40 bp, Artificial Sequence
  Description of Artificial Sequence: Synthetic primer
gcatatgctcggaaagttgaaggggacatgtatgaatctg

SEQ ID NO: 27808 - DNA, 40 bp, Artificial Sequence
  Description of Artificial Sequence: Synthetic primer
cggaacgctgtgatgaaaatgcagctgcccagttactgtc

SEQ ID NO: 27809 - DNA, 40 bp, Artificial Sequence
  Description of Artificial Sequence: Synthetic primer
acccccagccccaccattcagcgcgcaagataccctccag

SEQ ID NO: 27810 - DNA, 40 bp, Artificial Sequence
  Description of Artificial Sequence: Synthetic primer
aaggttatctcctcccgggtaaagccatttcgtcctctcc

SEQ ID NO: 27811 - DNA, 40 bp, Artificial Sequence
  Description of Artificial Sequence: Synthetic primer
acccaccaaccagcagctgcgctgcggaagccaccaggag

SEQ ID NO: 27812 - DNA, 40 bp, Artificial Sequence
  Description of Artificial Sequence: Synthetic primer
gagatgttctcacagaacagaaccccacagctggataagg

SEQ ID NO: 27813 - DNA, 40 bp, Artificial Sequence
  Description of Artificial Sequence: Synthetic primer
tagagacttagcactttaggccaaccacctccaggaaatc

SEQ ID NO: 27814 - DNA, 40 bp, Artificial Sequence
  Description of Artificial Sequence: Synthetic primer
gacgttttctaattctatgtcagcaacaatcccggattcc

SEQ ID NO: 27815 - DNA, 40 bp, Artificial Sequence
  Description of Artificial Sequence: Synthetic primer
ttgtgacatgggaggaagtcacgttttatggaggcagcag

SEQ ID NO: 27816 - DNA, 40 bp, Artificial Sequence
  Description of Artificial Sequence: Synthetic primer
agcccatcttctttcacagccatgataaatggtggttcac

SEQ ID NO: 27817 - DNA, 40 bp, Artificial Sequence
  Description of Artificial Sequence: Synthetic primer
gactttactgttgccaaaccaaaatctccaattttcactg

SEQ ID NO: 27818 - DNA, 40 bp, Artificial Sequence
  Description of Artificial Sequence: Synthetic primer
atgtagaaaagtttgaggctttgttaaaagtggggagaag

SEQ ID NO: 27819 - DNA, 40 bp, Artificial Sequence
  Description of Artificial Sequence: Synthetic primer
aaaggaagaagcatttttgctgttagcccagatggctttg

SEQ ID NO: 27820 - DNA, 40 bp, Artificial Sequence
  Description of Artificial Sequence: Synthetic primer
gaggacagcagcgagctggtgactggaagtgtcctaatcc

SEQ ID NO: 27821 - DNA, 40 bp, Artificial Sequence
  Description of Artificial Sequence: Synthetic primer
agcagccccatcacccagtgatcagtcgcctcagtaaagc

SEQ ID NO: 27822 - DNA, 40 bp, Artificial Sequence
  Description of Artificial Sequence: Synthetic primer
tgaatatgattttatctacccttattttgggggtaatacg

SEQ ID NO: 27823 - DNA, 40 bp, Artificial Sequence
  Description of Artificial Sequence: Synthetic primer
tcttccatctatataattatgattattcattctaacttag

SEQ ID NO: 27824 - DNA, 40 bp, Artificial Sequence
  Description of Artificial Sequence: Synthetic primer
cattatcagaagtcatggaagcactctgtttatcaattac

SEQ ID NO: 27825 - DNA, 40 bp, Artificial Sequence
  Description of Artificial Sequence: Synthetic primer
cgtgaatggggagcctgtgcatggcatggtgcatcctgag

SEQ ID NO: 27826 - DNA, 40 bp, Artificial Sequence
  Description of Artificial Sequence: Synthetic primer
agggcccggctctgcggcccccggagccatgggctgcatc

SEQ ID NO: 27827 - DNA, 40 bp, Artificial Sequence
  Description of Artificial Sequence: Synthetic primer
aactatggggccttcccagcatttgactgttcattgcata

SEQ ID NO: 27828 - DNA, 40 bp, Artificial Sequence
  Description of Artificial Sequence: Synthetic primer
accagtggtttgcaagcatggtttcctggatctcacagac

SEQ ID NO: 27829 - DNA, 40 bp, Artificial Sequence
  Description of Artificial Sequence: Synthetic primer
atggggaaggaagaactctggaaatgggataggggtgctg

SEQ ID NO: 27830 - DNA, 40 bp, Artificial Sequence
  Description of Artificial Sequence: Synthetic primer
tcagcgctggcctcggcggcgcctaacttggcccagatgc

SEQ ID NO: 27831 - DNA, 40 bp, Artificial Sequence
  Description of Artificial Sequence: Synthetic primer
ttactttgtgtagacaagaagatgagagtctttccttcag

SEQ ID NO: 27832 - DNA, 40 bp, Artificial Sequence
  Description of Artificial Sequence: Synthetic primer
atagcctctgccaacaccacctgcccaaagcagccctctc

SEQ ID NO: 27833 - DNA, 40 bp, Artificial Sequence
  Description of Artificial Sequence: Synthetic primer
tttgcatcgggcccaatgtgctcatggttcacaaaagaag

SEQ ID NO: 27834 - DNA, 40 bp, Artificial Sequence
  Description of Artificial Sequence: Synthetic primer
gccagatataattttttgtttttaaggccacaaaatatgg

SEQ ID NO: 27835 - DNA, 40 bp, Artificial Sequence
  Description of Artificial Sequence: Synthetic primer
ccagagaaaaatcggcagatgttacagctgctcatgaacc

SEQ ID NO: 27836 - DNA, 40 bp, Artificial Sequence
  Description of Artificial Sequence: Synthetic primer
ctcgaccagccgagcgagcggcggccccggctcctcctcg

SEQ ID NO: 27837 - DNA, 40 bp, Artificial Sequence
  Description of Artificial Sequence: Synthetic primer
ttggtgattttgttgcattgtccgatgtttgtgatgtacc

SEQ ID NO: 27838 - DNA, 40 bp, Artificial Sequence
  Description of Artificial Sequence: Synthetic primer
cgaattcgatctctcctcacaaacagcccaggaaattaca

SEQ ID NO: 27839 - DNA, 40 bp, Artificial Sequence
  Description of Artificial Sequence: Synthetic primer
gcatgtctatgcttgaggaacttttccaaatgtgtgtgtc

SEQ ID NO: 27840 - DNA, 40 bp, Artificial Sequence
  Description of Artificial Sequence: Synthetic primer
aggagcagttccccacatattggcacttgcggccgttctg

SEQ ID NO: 27841 - DNA, 40 bp, Artificial Sequence
  Description of Artificial Sequence: Synthetic primer
gaagctggttaggaagctgaagggaggaagttcacgagag

SEQ ID NO: 27842 - DNA, 40 bp, Artificial Sequence
  Description of Artificial Sequence: Synthetic primer
ttcaaatttgccttgacgtctgtaaagtgccccaaggttt

SEQ ID NO: 27843 - DNA, 40 bp, Artificial Sequence
  Description of Artificial Sequence: Synthetic primer
tagaaagatccatggggctcttcacaatatcaaagtaatc

SEQ ID NO: 27844 - DNA, 40 bp, Artificial Sequence
  Description of Artificial Sequence: Synthetic primer
tgaggttttcatagtcactggccatactgtcctggaggtg

SEQ ID NO: 27845 - DNA, 40 bp, Artificial Sequence
  Description of Artificial Sequence: Synthetic primer
gacttcgggtcgggggcgctgctcaaggacaccgtctaca

SEQ ID NO: 27846 - DNA, 40 bp, Artificial Sequence
  Description of Artificial Sequence: Synthetic primer
aaatgtgaaagtaactttatgcttaaataaattatagttg

SEQ ID NO: 27847 - DNA, 40 bp, Artificial Sequence
  Description of Artificial Sequence: Synthetic primer
catggtgctcttcttcttcgagaattacaccggggtccag

SEQ ID NO: 27848 - DNA, 40 bp, Artificial Sequence
  Description of Artificial Sequence: Synthetic primer
acagtttaaaaattcacatactccaaaccgagagaagacc

SEQ ID NO: 27849 - DNA, 40 bp, Artificial Sequence
  Description of Artificial Sequence: Synthetic primer
gagcatctagacaacttagtccctccagcgggaaagtagc

SEQ ID NO: 27850 - DNA, 40 bp, Artificial Sequence
  Description of Artificial Sequence: Synthetic primer
gtctgtattttaacttcagagagctccgcctccagagaag

SEQ ID NO: 27851 - DNA, 40 bp, Artificial Sequence
  Description of Artificial Sequence: Synthetic primer
ctaagtggttagaggaactgtttgtcatttccctctcagg

SEQ ID NO: 27852 - DNA, 40 bp, Artificial Sequence
  Description of Artificial Sequence: Synthetic primer
agagctgaacaatggcttttcaggcttcttcatagtagtc

SEQ ID NO: 27853 - DNA, 40 bp, Artificial Sequence
  Description of Artificial Sequence: Synthetic primer
agcttcaaagaagttggcaactacgcggctgtggagagtg

SEQ ID NO: 27854 - DNA, 40 bp, Artificial Sequence
  Description of Artificial Sequence: Synthetic primer
tgagcaaaataagataaaagattacatgtttatcttcagg

SEQ ID NO: 27855 - DNA, 40 bp, Artificial Sequence
  Description of Artificial Sequence: Synthetic primer
ccgctgaattaaatgagaagctccctttacatgcaactgt

SEQ ID NO: 27856 - DNA, 40 bp, Artificial Sequence
  Description of Artificial Sequence: Synthetic primer
gaccttatttatcagcttaaagaggagacacttcaacagc

SEQ ID NO: 27857 - DNA, 40 bp, Artificial Sequence
  Description of Artificial Sequence: Synthetic primer
ttttcggtttatgttttaaatcccagagagcatcctggtt

SEQ ID NO: 27858 - DNA, 40 bp, Artificial Sequence
  Description of Artificial Sequence: Synthetic primer
tcttcaccttgtgcaacatgaatctcctgttccccttctc

SEQ ID NO: 27859 - DNA, 40 bp, Artificial Sequence
  Description of Artificial Sequence: Synthetic primer
attgtgacttcgtgctccttcagggggccctggtaatctc

SEQ ID NO: 27860 - DNA, 40 bp, Artificial Sequence
  Description of Artificial Sequence: Synthetic primer
gagggggagggggaacgacagcacactggcggtaaaattg

SEQ ID NO: 27861 - DNA, 40 bp, Artificial Sequence
  Description of Artificial Sequence: Synthetic primer
tttctctccagtgtgatccctttcttgtgttctaatggat

SEQ ID NO: 27862 - DNA, 40 bp, Artificial Sequence
  Description of Artificial Sequence: Synthetic primer
aagatagcctgaaaaaaattaaaaggacaccttctgctac

SEQ ID NO: 27863 - DNA, 40 bp, Artificial Sequence
  Description of Artificial Sequence: Synthetic primer
acctttcatttaattttctaagattttaacctgaacttgg

SEQ ID NO: 27864 - DNA, 40 bp, Artificial Sequence
  Description of Artificial Sequence: Synthetic primer
ggtacttcacctggtggcggatcagcacctcgtcaaagcg

SEQ ID NO: 27865 - DNA, 40 bp, Artificial Sequence
  Description of Artificial Sequence: Synthetic primer
caccgtaaggaaacgagggtggagtcacattcatataagc

SEQ ID NO: 27866 - DNA, 40 bp, Artificial Sequence
  Description of Artificial Sequence: Synthetic primer
gtgcttcatgaagggtttccaattgctcatccggatccat

SEQ ID NO: 27867 - DNA, 40 bp, Artificial Sequence
  Description of Artificial Sequence: Synthetic primer
atacggtggccccttaaagagccctccatcttgcctcttg

SEQ ID NO: 27868 - DNA, 40 bp, Artificial Sequence
  Description of Artificial Sequence: Synthetic primer
aacaaatttagaggaagtaaaaagataaatgtgatgattg

SEQ ID NO: 27869 - DNA, 40 bp, Artificial Sequence
  Description of Artificial Sequence: Synthetic primer
gacctggcccggggacacatctcctgagggatcccagaaa

SEQ ID NO: 27870 - DNA, 40 bp, Artificial Sequence
  Description of Artificial Sequence: Synthetic primer
tacctaattatggcaagtatatgagttttggtgattgtgg

SEQ ID NO: 27871 - DNA, 40 bp, Artificial Sequence
  Description of Artificial Sequence: Synthetic primer
tctgtaggaataactgcagcaggagctggaaatgtgtagg

SEQ ID NO: 27872 - DNA, 40 bp, Artificial Sequence
  Description of Artificial Sequence: Synthetic primer
gcgcggaggcgcagaggcgcacgggcagcggcggacgctc

SEQ ID NO: 27873 - DNA, 40 bp, Artificial Sequence
  Description of Artificial Sequence: Synthetic primer
aaatatcttgcaagcaaaaagtttgtccacagagacttgg

SEQ ID NO: 27874 - DNA, 40 bp, Artificial Sequence
  Description of Artificial Sequence: Synthetic primer
tcagttgaggcgcgactccttttctttagaggtttacagg

SEQ ID NO: 27875 - DNA, 40 bp, Artificial Sequence
  Description of Artificial Sequence: Synthetic primer
atgtaggcagagctttgtcttttcaaagagggtggggtag

SEQ ID NO: 27876 - DNA, 40 bp, Artificial Sequence
  Description of Artificial Sequence: Synthetic primer
catgttcagctttgcaggcatacaaggcttttgccttccg

SEQ ID NO: 27877 - DNA, 40 bp, Artificial Sequence
  Description of Artificial Sequence: Synthetic primer
ctcagaaaccgccaagtcctcccatgtcaggccggggaac

SEQ ID NO: 27878 - DNA, 40 bp, Artificial Sequence
  Description of Artificial Sequence: Synthetic primer
gaagagtcttcagatgatgaagataaagaaagtgaagagg

SEQ ID NO: 27879 - DNA, 40 bp, Artificial Sequence
  Description of Artificial Sequence: Synthetic primer
gacatgaaaacccaaccaaaacaattactgtatcaaaatg

SEQ ID NO: 27880 - DNA, 40 bp, Artificial Sequence
  Description of Artificial Sequence: Synthetic primer
tcatctggtggaggtggtggcggtggagttggactatcag

SEQ ID NO: 27881 - DNA, 40 bp, Artificial Sequence
  Description of Artificial Sequence: Synthetic primer
cttgggccgtgagagttgcctgcccaggggaggtgacaag

SEQ ID NO: 27882 - DNA, 40 bp, Artificial Sequence
  Description of Artificial Sequence: Synthetic primer
ttatttctagaagttaggtgggcagcttggaaggcagagg

SEQ ID NO: 27883 - DNA, 40 bp, Artificial Sequence
  Description of Artificial Sequence: Synthetic primer
tctttctctcaatgtcattaaccttctgtgaagctctacc

SEQ ID NO: 27884 - DNA, 40 bp, Artificial Sequence
  Description of Artificial Sequence: Synthetic primer
aaagacatttacaacacagcttgtggatatgggggcaaag

SEQ ID NO: 27885 - DNA, 40 bp, Artificial Sequence
  Description of Artificial Sequence: Synthetic primer
gtgattaaaactaagcagcagacgcttctatataataaca

SEQ ID NO: 27886 - DNA, 40 bp, Artificial Sequence
  Description of Artificial Sequence: Synthetic primer
gtctatagcttccaatttcattccttccttgaaccattcc

SEQ ID NO: 27887 - DNA, 40 bp, Artificial Sequence
  Description of Artificial Sequence: Synthetic primer
tagcagtggtattagacacacacagatctgacaaataatc

SEQ ID NO: 27888 - DNA, 40 bp, Artificial Sequence
  Description of Artificial Sequence: Synthetic primer
tgttgctctgggattccggagacggcctcttcaccctgtc

SEQ ID NO: 27889 - DNA, 40 bp, Artificial Sequence
  Description of Artificial Sequence: Synthetic primer
ctggttgactggggagtctggggcccctgcatagatcctg

SEQ ID NO: 27890 - DNA, 40 bp, Artificial Sequence
  Description of Artificial Sequence: Synthetic primer
aaagtagagtaggtagtctggctttcacctgatgttattg

SEQ ID NO: 27891 - DNA, 40 bp, Artificial Sequence
  Description of Artificial Sequence: Synthetic primer
ttctctcttctgtttcggtagattccattttacagtcttc

SEQ ID NO: 27892 - DNA, 40 bp, Artificial Sequence
  Description of Artificial Sequence: Synthetic primer
agctgcaaataacttttcataagacttgtactttgttttt

SEQ ID NO: 27893 - DNA, 40 bp, Artificial Sequence
  Description of Artificial Sequence: Synthetic primer
tgatatatttctcaagaatatcaattccccactgtgtgtg

SEQ ID NO: 27894 - DNA, 40 bp, Artificial Sequence
  Description of Artificial Sequence: Synthetic primer
agggatcctgcctgcccctaccctggacttgcctctgcac

SEQ ID NO: 27895 - DNA, 40 bp, Artificial Sequence
  Description of Artificial Sequence: Synthetic primer
cctttttcttcccattcagcctgattatttggaagccttt

SEQ ID NO: 27896 - DNA, 40 bp, Artificial Sequence
  Description of Artificial Sequence: Synthetic primer
cctgggaactgccccgcccactttggccctgcactaccac

SEQ ID NO: 27897 - DNA, 40 bp, Artificial Sequence
  Description of Artificial Sequence: Synthetic primer
cggtaaagggaaaggctctagcagcagccgccacgctttc

SEQ ID NO: 27898 - DNA, 40 bp, Artificial Sequence
  Description of Artificial Sequence: Synthetic primer
gagcttgcattctgaagcaagagcctacaaaaggcacttg

SEQ ID NO: 27899 - DNA, 40 bp, Artificial Sequence
  Description of Artificial Sequence: Synthetic primer
gccctcacactctgctacatgatcatcagagccacagcta

SEQ ID NO: 27900 - DNA, 40 bp, Artificial Sequence
  Description of Artificial Sequence: Synthetic primer
tacagcctaccatcaacagttgtgcattataaaaaggtag

SEQ ID NO: 27901 - DNA, 40 bp, Artificial Sequence
  Description of Artificial Sequence: Synthetic primer
taaatatagcaactttaatatcctgttccacctgcttttg

SEQ ID NO: 27902 - DNA, 40 bp, Artificial Sequence
  Description of Artificial Sequence: Synthetic primer
gttgctttgctgttccatgaaagcgctccctggctgcttg

SEQ ID NO: 27903 - DNA, 40 bp, Artificial Sequence
  Description of Artificial Sequence: Synthetic primer
cctttccatttcttcagatgtatctacttttactactagg

SEQ ID NO: 27904 - DNA, 40 bp, Artificial Sequence
  Description of Artificial Sequence: Synthetic primer
ctggttggcatttatggcagaaaaggcctccctccttcac

SEQ ID NO: 27905 - DNA, 40 bp, Artificial Sequence
  Description of Artificial Sequence: Synthetic primer
gcaagcattctatattccaagaaatttggaacacctatac

SEQ ID NO: 27906 - DNA, 40 bp, Artificial Sequence
  Description of Artificial Sequence: Synthetic primer
agaacactgtgaccttagcccagcaagccaggcccttcat

SEQ ID NO: 27907 - DNA, 40 bp, Artificial Sequence
  Description of Artificial Sequence: Synthetic primer
tttaataccacccctcccttgccctctgcctccagcatac

SEQ ID NO: 27908 - DNA, 40 bp, Artificial Sequence
  Description of Artificial Sequence: Synthetic primer
gtattcaagtaacatatatacaagggtattacaaatatgc

SEQ ID NO: 27909 - DNA, 40 bp, Artificial Sequence
  Description of Artificial Sequence: Synthetic primer
tagtgaacaggccgttttcaacacttgtgccttggggtgt

SEQ ID NO: 27910 - DNA, 40 bp, Artificial Sequence
  Description of Artificial Sequence: Synthetic primer
tgaatctccaatttgataaaacgtcccagtctctgaatcc

SEQ ID NO: 27911 - DNA, 40 bp, Artificial Sequence
  Description of Artificial Sequence: Synthetic primer
tcttctcttgctttaatccttccccccggctctctggctc

SEQ ID NO: 27912 - DNA, 40 bp, Artificial Sequence
  Description of Artificial Sequence: Synthetic primer
ttataatgccatctctttgtttaatggcagcttcaaattc

SEQ ID NO: 27913 - DNA, 40 bp, Artificial Sequence
  Description of Artificial Sequence: Synthetic primer
tgaccgggggctgggagggaggaggggcggattgcagagg

SEQ ID NO: 27914 - DNA, 40 bp, Artificial Sequence
  Description of Artificial Sequence: Synthetic primer
atatttataaagagaatgttgttaaccccatggggagaag

SEQ ID NO: 27915 - DNA, 40 bp, Artificial Sequence
  Description of Artificial Sequence: Synthetic primer
gcacaacaaagagattgcaggtgaccacagccgatacagg

SEQ ID NO: 27916 - DNA, 40 bp, Artificial Sequence
  Description of Artificial Sequence: Synthetic primer
tgttaccaggtccacctcgatcttggctggtccctcgtag

SEQ ID NO: 27917 - DNA, 40 bp, Artificial Sequence
  Description of Artificial Sequence: Synthetic primer
ccaatcttaggttggttgttcccaaacaaagatgcctgtc

SEQ ID NO: 27918 - DNA, 40 bp, Artificial Sequence
  Description of Artificial Sequence: Synthetic primer
tagactttaccacatcctggtatatgacaaatgtgttgct

SEQ ID NO: 27919 - DNA, 40 bp, Artificial Sequence
  Description of Artificial Sequence: Synthetic primer
aggaacatctctttcaatgataagaaatttgtcatcaagc

SEQ ID NO: 27920 - DNA, 40 bp, Artificial Sequence
  Description of Artificial Sequence: Synthetic primer
aatggtgtgatcgtctcctcattgagcagcggctgccacc

SEQ ID NO: 27921 - DNA, 40 bp, Artificial Sequence
  Description of Artificial Sequence: Synthetic primer
tttggttacagactcaaggaaacctctcattttagagtgc

SEQ ID NO: 27922 - DNA, 40 bp, Artificial Sequence
  Description of Artificial Sequence: Synthetic primer
tgcagcttttatatcacttcatgatttgagagtttgtttc

SEQ ID NO: 27923 - DNA, 40 bp, Artificial Sequence
  Description of Artificial Sequence: Synthetic primer
atgcctccatcacgctacagcagcagctaaaagaactgac

SEQ ID NO: 27924 - DNA, 40 bp, Artificial Sequence
  Description of Artificial Sequence: Synthetic primer
ccacaatatagctttcaagatatttagattaaactctaac

SEQ ID NO: 27925 - DNA, 40 bp, Artificial Sequence
  Description of Artificial Sequence: Synthetic primer
aaggtgggtctctgtgagggcactgcatgccagcagtccc

SEQ ID NO: 27926 - DNA, 40 bp, Artificial Sequence
  Description of Artificial Sequence: Synthetic primer
ccaatataatcaactgagagagatataaatttttttcagc

SEQ ID NO: 27927 - DNA, 40 bp, Artificial Sequence
  Description of Artificial Sequence: Synthetic primer
gggcgaacccccgatcttgggcatgaacatggagccctac

SEQ ID NO: 27928 - DNA, 40 bp, Artificial Sequence
  Description of Artificial Sequence: Synthetic primer
actgtactgaaggtgtgtcctcaagaagaaagtgttcaaa

SEQ ID NO: 27929 - DNA, 40 bp, Artificial Sequence
  Description of Artificial Sequence: Synthetic primer
gcccgaagtagggggccacgagccggacgcgggcggagag

SEQ ID NO: 27930 - DNA, 40 bp, Artificial Sequence
  Description of Artificial Sequence: Synthetic primer
taaagcaaatgaaaaaattaaaaagtgtgactttttctcg

SEQ ID NO: 27931 - DNA, 40 bp, Artificial Sequence
  Description of Artificial Sequence: Synthetic primer
tccttttttgtcctagggtgaactccatcatcaaagataa

SEQ ID NO: 27932 - DNA, 40 bp, Artificial Sequence
  Description of Artificial Sequence: Synthetic primer
aagcactacgagcttgctggtgttgctgagggctgggaag

SEQ ID NO: 27933 - DNA, 40 bp, Artificial Sequence
  Description of Artificial Sequence: Synthetic primer
ctttggagcagaagaaggaggagtgtctgaaaatggaatc

SEQ ID NO: 27934 - DNA, 40 bp, Artificial Sequence
  Description of Artificial Sequence: Synthetic primer
gactttctatgttttaggctgcagcgacttcgaacttctt

SEQ ID NO: 27935 - DNA, 40 bp, Artificial Sequence
  Description of Artificial Sequence: Synthetic primer
tagggtagtcataattgatgacaaatttcacatcttccac

SEQ ID NO: 27936 - DNA, 40 bp, Artificial Sequence
  Description of Artificial Sequence: Synthetic primer
gagccacataagaggctcggggaggtgaacggcgcagagg

SEQ ID NO: 27937 - DNA, 40 bp, Artificial Sequence
  Description of Artificial Sequence: Synthetic primer
gatcgggaaggcagatttgttcttaagaatgagaatgacg

SEQ ID NO: 27938 - DNA, 40 bp, Artificial Sequence
  Description of Artificial Sequence: Synthetic primer
tacttgagagtaaggcacagagaggaatgtgtttctgaac

SEQ ID NO: 27939 - DNA, 40 bp, Artificial Sequence
  Description of Artificial Sequence: Synthetic primer
cagttcctcctcagaattcccccctcaacttcgaagtgtg

SEQ ID NO: 27940 - DNA, 40 bp, Artificial Sequence
  Description of Artificial Sequence: Synthetic primer
caacgaaaaactgctgaaagaaaaggaagctctgagtgag

SEQ ID NO: 27941 - DNA, 40 bp, Artificial Sequence
  Description of Artificial Sequence: Synthetic primer
tatgagcataacaacttaggagtgtgtctacatacttaac

SEQ ID NO: 27942 - DNA, 40 bp, Artificial Sequence
  Description of Artificial Sequence: Synthetic primer
accagggcagcagcggctacaacttccggcccacagatgc

SEQ ID NO: 27943 - DNA, 40 bp, Artificial Sequence
  Description of Artificial Sequence: Synthetic primer
gccagaacaggcccatatttgtcagtattgcttggaggtc

SEQ ID NO: 27944 - DNA, 40 bp, Artificial Sequence
  Description of Artificial Sequence: Synthetic primer
tctggaactcaagatttgaccatatctgttttgaggattc

SEQ ID NO: 27945 - DNA, 40 bp, Artificial Sequence
  Description of Artificial Sequence: Synthetic primer
cagaacagattcaggcaggcgctggctgcttgagaggtgg

SEQ ID NO: 27946 - DNA, 40 bp, Artificial Sequence
  Description of Artificial Sequence: Synthetic primer
taggcctgtgaggcctgcgggtgcccctgtcccccagctc

SEQ ID NO: 27947 - DNA, 40 bp, Artificial Sequence
  Description of Artificial Sequence: Synthetic primer
tattataacaaagtgaaggttttctccctgggaaatgcag

SEQ ID NO: 27948 - DNA, 40 bp, Artificial Sequence
  Description of Artificial Sequence: Synthetic primer
tctcggcggagccccgcgcccgccgcgccatggcccgaag

SEQ ID NO: 27949 - DNA, 40 bp, Artificial Sequence
  Description of Artificial Sequence: Synthetic primer
gcaggtgccccctacgcacacgccatggccaccacagtcg

SEQ ID NO: 27950 - DNA, 40 bp, Artificial Sequence
  Description of Artificial Sequence: Synthetic primer
cagcagcctccgggggaaaaaagcttagcctagcagtcag

SEQ ID NO: 27951 - DNA, 40 bp, Artificial Sequence
  Description of Artificial Sequence: Synthetic primer
gaagactcatcggagcgtgtggatttgagccgccgcattt

SEQ ID NO: 27952 - DNA, 40 bp, Artificial Sequence
  Description of Artificial Sequence: Synthetic primer
tgtcgagttctacaacttttagtgtttcattcccctccag

SEQ ID NO: 27953 - DNA, 40 bp, Artificial Sequence
  Description of Artificial Sequence: Synthetic primer
tgcccactgggacctctggtcatgggaggtgggttcatac

SEQ ID NO: 27954 - DNA, 40 bp, Artificial Sequence
  Description of Artificial Sequence: Synthetic primer
ggtacagaaatcacccaggataacccctccagcggcaaag

SEQ ID NO: 27955 - DNA, 40 bp, Artificial Sequence
  Description of Artificial Sequence: Synthetic primer
gctcaccagtgggagggtcttataatcttccctctcttcc

SEQ ID NO: 27956 - DNA, 40 bp, Artificial Sequence
  Description of Artificial Sequence: Synthetic primer
cacggacaacccctacccatgaggccctgatggaaaacac

SEQ ID NO: 27957 - DNA, 40 bp, Artificial Sequence
  Description of Artificial Sequence: Synthetic primer
ggtggagggggagtgccgcggggaacccagcagtgtgcag

SEQ ID NO: 27958 - DNA, 40 bp, Artificial Sequence
  Description of Artificial Sequence: Synthetic primer
tcatgccggacttctttccacttatgtcctggaggaggag

SEQ ID NO: 27959 - DNA, 40 bp, Artificial Sequence
  Description of Artificial Sequence: Synthetic primer
cgtgagcctctctgactgcttcttccccgggggggactgc

SEQ ID NO: 27960 - DNA, 40 bp, Artificial Sequence
  Description of Artificial Sequence: Synthetic primer
agaactggttgtctttctttaaagaaagtcttagttacag

SEQ ID NO: 27961 - DNA, 40 bp, Artificial Sequence
  Description of Artificial Sequence: Synthetic primer
ccgtggtagtgtaggtgatgtgctagaggtcacaatcaag

SEQ ID NO: 27962 - DNA, 40 bp, Artificial Sequence
  Description of Artificial Sequence: Synthetic primer
tgtcaagtactgaaataaaaatgacttcaccattttcacc

SEQ ID NO: 27963 - DNA, 40 bp, Artificial Sequence
  Description of Artificial Sequence: Synthetic primer
aagtggcctggtatggtagcttccttccaacggcctacag

SEQ ID NO: 27964 - DNA, 40 bp, Artificial Sequence
  Description of Artificial Sequence: Synthetic primer
tcgcagctgtgcttgagtttcaaagggggagaggtttgtg

SEQ ID NO: 27965 - DNA, 40 bp, Artificial Sequence
  Description of Artificial Sequence: Synthetic primer
actgagctcaaaactggttcagatctcatggttttattac

SEQ ID NO: 27966 - DNA, 40 bp, Artificial Sequence
  Description of Artificial Sequence: Synthetic primer
ggccgccggagcccagtgtcctgcattgacccggaagcag

SEQ ID NO: 27967 - DNA, 40 bp, Artificial Sequence
  Description of Artificial Sequence: Synthetic primer
caataactggtgggcccagagcgtggagctctgcaagaag

SEQ ID NO: 27968 - DNA, 40 bp, Artificial Sequence
  Description of Artificial Sequence: Synthetic primer
gtcttcgcggacggtgctggccccgggcaacgatcggaac

SEQ ID NO: 27969 - DNA, 40 bp, Artificial Sequence
  Description of Artificial Sequence: Synthetic primer
tcaaccctctcaggtgaccaaaatccccttctcatcactc

SEQ ID NO: 27970 - DNA, 40 bp, Artificial Sequence
  Description of Artificial Sequence: Synthetic primer
cagacgatgaaaacttgggctgggtaacaggaaatgtcac

SEQ ID NO: 27971 - DNA, 40 bp, Artificial Sequence
  Description of Artificial Sequence: Synthetic primer
gttttatccccaaagcctaattgttgcctcgtcggctgtg

SEQ ID NO: 27972 - DNA, 40 bp, Artificial Sequence
  Description of Artificial Sequence: Synthetic primer
tgttttccagaagaatcagaagcagacttttcttccctac

SEQ ID NO: 27973 - DNA, 40 bp, Artificial Sequence
  Description of Artificial Sequence: Synthetic primer
tccctccccacctccacccggccgctaacgcgggcgcccg

SEQ ID NO: 27974 - DNA, 40 bp, Artificial Sequence
  Description of Artificial Sequence: Synthetic primer
tgctttcttggagtatggttttgcttctccaagttaaaag

SEQ ID NO: 27975 - DNA, 40 bp, Artificial Sequence
  Description of Artificial Sequence: Synthetic primer
ttaatggggaaacatcatttctagattagcatactctttg

SEQ ID NO: 27976 - DNA, 40 bp, Artificial Sequence
  Description of Artificial Sequence: Synthetic primer
atttgccagggcctgtaatttctgcacttcagcttttaat

SEQ ID NO: 27977 - DNA, 40 bp, Artificial Sequence
  Description of Artificial Sequence: Synthetic primer
cccccagtcccccccagagaaccctggccagccatcgatg

SEQ ID NO: 27978 - DNA, 40 bp, Artificial Sequence
  Description of Artificial Sequence: Synthetic primer
ttgaggtagtatgttaagcttttcctttggtctcattcag

SEQ ID NO: 27979 - DNA, 40 bp, Artificial Sequence
  Description of Artificial Sequence: Synthetic primer
gatgttatcaagcacaaagcacgtggcaaaggaaagatgc

SEQ ID NO: 27980 - DNA, 40 bp, Artificial Sequence
  Description of Artificial Sequence: Synthetic primer
tgagtggacctgtgtgtcagcctaacccttccccattttg

SEQ ID NO: 27981 - DNA, 40 bp, Artificial Sequence
  Description of Artificial Sequence: Synthetic primer
gtgccccccgggaaatccaagtaccttggagaagattaac

SEQ ID NO: 27982 - DNA, 40 bp, Artificial Sequence
  Description of Artificial Sequence: Synthetic primer
atacatggtccggcgcaggggggacccggcaggggctcgc

SEQ ID NO: 27983 - DNA, 40 bp, Artificial Sequence
  Description of Artificial Sequence: Synthetic primer
acgactgcagccgcactgcacaagtgtacccccacacagc

SEQ ID NO: 27984 - DNA, 40 bp, Artificial Sequence
  Description of Artificial Sequence: Synthetic primer
aacaagtaggagcgctctctccctcagctgtgtcatctgc

SEQ ID NO: 27985 - DNA, 40 bp, Artificial Sequence
  Description of Artificial Sequence: Synthetic primer
aagcaccagtgccatacccctggacaggctggctgtatgc

SEQ ID NO: 27986 - DNA, 40 bp, Artificial Sequence
  Description of Artificial Sequence: Synthetic primer
gggcgacatctcccggttgacgctctccacacacatgacc

SEQ ID NO: 27987 - DNA, 40 bp, Artificial Sequence
  Description of Artificial Sequence: Synthetic primer
ccatacagcgcgtatggcgaatagtagggtccggctgtgg

SEQ ID NO: 27988 - DNA, 40 bp, Artificial Sequence
  Description of Artificial Sequence: Synthetic primer
gcagaggctaagcctgttactaaagggacatatttcaagg

SEQ ID NO: 27989 - DNA, 40 bp, Artificial Sequence
  Description of Artificial Sequence: Synthetic primer
cctacacggagcagagctacgaccggtccttcgaggagtc

SEQ ID NO: 27990 - DNA, 40 bp, Artificial Sequence
  Description of Artificial Sequence: Synthetic primer
ggccccaaaagcggtcgtgtagcccacggtgagaatccag

SEQ ID NO: 27991 - DNA, 40 bp, Artificial Sequence
  Description of Artificial Sequence: Synthetic primer
ctttctaaccgaagataagtaacctactatattattctaa

SEQ ID NO: 27992 - DNA, 40 bp, Artificial Sequence
  Description of Artificial Sequence: Synthetic primer
tcttttgtatcttctctgtgagggaagccagggacaattc

SEQ ID NO: 27993 - DNA, 40 bp, Artificial Sequence
  Description of Artificial Sequence: Synthetic primer
gtcttggacaacatctggctttactctgcacatcatttcc

SEQ ID NO: 27994 - DNA, 40 bp, Artificial Sequence
  Description of Artificial Sequence: Synthetic primer
cttggtttatgtcttgttcttgagattttgtatatttagg

SEQ ID NO: 27995 - DNA, 40 bp, Artificial Sequence
  Description of Artificial Sequence: Synthetic primer
ttcagttgaaatgcaactactgcaaaaattccttttgttc

SEQ ID NO: 27996 - DNA, 40 bp, Artificial Sequence
  Description of Artificial Sequence: Synthetic primer
tcctccaggtgtcaccaatcttgtaggactgacccccttc

SEQ ID NO: 27997 - DNA, 40 bp, Artificial Sequence
  Description of Artificial Sequence: Synthetic primer
gatccgcccaggtagcggcctcggacccaggtcctgcgcc

SEQ ID NO: 27998 - DNA, 40 bp, Artificial Sequence
  Description of Artificial Sequence: Synthetic primer
agctcagaagagaggcgtaaagctcgtttcggtgctctgg

SEQ ID NO: 27999 - DNA, 40 bp, Artificial Sequence
  Description of Artificial Sequence: Synthetic primer
taggcaaggctccagctgcgacaaggactccatcttcacg

SEQ ID NO: 28000 - DNA, 40 bp, Artificial Sequence
  Description of Artificial Sequence: Synthetic primer
ccaccctgagcgacgtgtggtccttcgggatcctgctctg

SEQ ID NO: 28001 - DNA, 40 bp, Artificial Sequence
  Description of Artificial Sequence: Synthetic primer
gccaagtaactgcaggcacttatttcttacaccatgagac

SEQ ID NO: 28002 - DNA, 40 bp, Artificial Sequence
  Description of Artificial Sequence: Synthetic primer
gtacaaagacggccacagcccctgcccgggtttaacttac

SEQ ID NO: 28003 - DNA, 40 bp, Artificial Sequence
  Description of Artificial Sequence: Synthetic primer
aaagactgcctggctgtcctgcccagccttcctggttctc

SEQ ID NO: 28004 - DNA, 40 bp, Artificial Sequence
  Description of Artificial Sequence: Synthetic primer
caaaatgaatcggagaataagaaactgttgggagaaattg

SEQ ID NO: 28005 - DNA, 40 bp, Artificial Sequence
  Description of Artificial Sequence: Synthetic primer
tatagtggacctgctccagtacagccagaaggacctggat

SEQ ID NO: 28006 - DNA, 40 bp, Artificial Sequence
  Description of Artificial Sequence: Synthetic primer
gaacccttggaaggtgatatgtccagccccaactccacag

SEQ ID NO: 28007 - DNA, 40 bp, Artificial Sequence
  Description of Artificial Sequence: Synthetic primer
ctttcatctctctacctccaccctgcattttcctcttgtc

SEQ ID NO: 28008 - DNA, 40 bp, Artificial Sequence
  Description of Artificial Sequence: Synthetic primer
gctttcgaagggaaacacaggtaccgccatttccgatgag

SEQ ID NO: 28009 - DNA, 40 bp, Artificial Sequence
  Description of Artificial Sequence: Synthetic primer
gataacccactatgctccacaaaggatatggcgtggccaa

SEQ ID NO: 28010 - DNA, 40 bp, Artificial Sequence
  Description of Artificial Sequence: Synthetic primer
tctggtgtgaacacccccgacagcagccctccgcccactc

SEQ ID NO: 28011 - DNA, 40 bp, Artificial Sequence
  Description of Artificial Sequence: Synthetic primer
gctcaagagcctcattatctaccacccgagatgccccaag

SEQ ID NO: 28012 - DNA, 40 bp, Artificial Sequence
  Description of Artificial Sequence: Synthetic primer
caggtgcaatgtctccctcagagatctttgaaaaggagtg

SEQ ID NO: 28013 - DNA, 40 bp, Artificial Sequence
  Description of Artificial Sequence: Synthetic primer
aatcaaggactatctggaggagctgtgggtccaggctcag

SEQ ID NO: 28014 - DNA, 40 bp, Artificial Sequence
  Description of Artificial Sequence: Synthetic primer
gcccgcctcggctgtgtgaggcacggcgcagcagtcacca

SEQ ID NO: 28015 - DNA, 40 bp, Artificial Sequence
  Description of Artificial Sequence: Synthetic primer
tgttcctctggggcagcccccacctccgtcctgacccgac

SEQ ID NO: 28016 - DNA, 40 bp, Artificial Sequence
  Description of Artificial Sequence: Synthetic primer
ggtcgtagctgagtgcacgttgaaagaaagcgcggccatc

SEQ ID NO: 28017 - DNA, 40 bp, Artificial Sequence
  Description of Artificial Sequence: Synthetic primer
gcgaccccagtcggtgctccggggaggtcacctgacgagg

SEQ ID NO: 28018 - DNA, 40 bp, Artificial Sequence
  Description of Artificial Sequence: Synthetic primer
tcccgtctgtgtggatagaaactagatctctggtttctgc

SEQ ID NO: 28019 - DNA, 40 bp, Artificial Sequence
  Description of Artificial Sequence: Synthetic primer
cccagaaactggggctgcgagttcgcaaggcgtataagag

SEQ ID NO: 28020 - DNA, 40 bp, Artificial Sequence
  Description of Artificial Sequence: Synthetic primer
tcctgttggtggttctcttcgtcatgatcaacaaatatgg

SEQ ID NO: 28021 - DNA, 40 bp, Artificial Sequence
  Description of Artificial Sequence: Synthetic primer
gcccaactataacacattcatggagtttgcctctgtcagc

SEQ ID NO: 28022 - DNA, 40 bp, Artificial Sequence
  Description of Artificial Sequence: Synthetic primer
tgccctggctgcggttcagctccttggtgagatctgtcat

SEQ ID NO: 28023 - DNA, 40 bp, Artificial Sequence
  Description of Artificial Sequence: Synthetic primer
ggacatattgaaatgcttattcatggcaggaccaactgtg

SEQ ID NO: 28024 - DNA, 40 bp, Artificial Sequence
  Description of Artificial Sequence: Synthetic primer
catatcaccttccaagggttcctcccggcacttgccaacc

SEQ ID NO: 28025 - DNA, 40 bp, Artificial Sequence
  Description of Artificial Sequence: Synthetic primer
cagctttaacttctgtctgctcctaatgggggcccaaagc

SEQ ID NO: 28026 - DNA, 40 bp, Artificial Sequence
  Description of Artificial Sequence: Synthetic primer
tcccgggccccatagtggtgcgggcactggacccccgggc

SEQ ID NO: 28027 - DNA, 40 bp, Artificial Sequence
  Description of Artificial Sequence: Synthetic primer
ctggaaacctagccagcttcacgattatgactaaagtacc

SEQ ID NO: 28028 - DNA, 40 bp, Artificial Sequence
  Description of Artificial Sequence: Synthetic primer
atcgctgtgtaactcagtcagaacgaggttccggtgtgtc

SEQ ID NO: 28029 - DNA, 40 bp, Artificial Sequence
  Description of Artificial Sequence: Synthetic primer
tggccgtctctgcctaagtaccgatgcagcagccccacag

SEQ ID NO: 28030 - DNA, 40 bp, Artificial Sequence
  Description of Artificial Sequence: Synthetic primer
cagggaaatagcctccgtttcgatgtcttgaaagcacaag

SEQ ID NO: 28031 - DNA, 40 bp, Artificial Sequence
  Description of Artificial Sequence: Synthetic primer
caagagaaacaggttaaattcaacataatttgtacatctc

SEQ ID NO: 28032 - DNA, 40 bp, Artificial Sequence
  Description of Artificial Sequence: Synthetic primer
aagcagttttgatagcaggcactgaagtatttgcatattg

SEQ ID NO: 28033 - DNA, 40 bp, Artificial Sequence
  Description of Artificial Sequence: Synthetic primer
cttggagttggtgctggtgttcctggacttggagttggtg

SEQ ID NO: 28034 - DNA, 40 bp, Artificial Sequence
  Description of Artificial Sequence: Synthetic primer
gactttttaacaaaaacaaatatcatcaagaaggcaatag

SEQ ID NO: 28035 - DNA, 40 bp, Artificial Sequence
  Description of Artificial Sequence: Synthetic primer
tttgattattctcgtgttagtattgttaacttctttttgc

SEQ ID NO: 28036 - DNA, 40 bp, Artificial Sequence
  Description of Artificial Sequence: Synthetic primer
tattccttgtggtttttattgcctttctctggaagcactg

SEQ ID NO: 28037 - DNA, 40 bp, Artificial Sequence
  Description of Artificial Sequence: Synthetic primer
tggggtcttaggtccacttctgccaaaggctccaacttcc

SEQ ID NO: 28038 - DNA, 40 bp, Artificial Sequence
  Description of Artificial Sequence: Synthetic primer
ctttccaggggtgctcgggcctcccctgggctcagggtgg

SEQ ID NO: 28039 - DNA, 40 bp, Artificial Sequence
  Description of Artificial Sequence: Synthetic primer
agccaccttgtggcttccagctgggtagcaggcaccgttc

SEQ ID NO: 28040 - DNA, 40 bp, Artificial Sequence
  Description of Artificial Sequence: Synthetic primer
actgtggttccaaacgtgaatggatatgcaaaatcccaag

SEQ ID NO: 28041 - DNA, 40 bp, Artificial Sequence
  Description of Artificial Sequence: Synthetic primer
aagaaaatgaatctttaaaagcacatgttcaggaagtagc

SEQ ID NO: 28042 - DNA, 40 bp, Artificial Sequence
  Description of Artificial Sequence: Synthetic primer
tacaatgtgttactatttaggaaaaaaattttaaaaatac

SEQ ID NO: 28043 - DNA, 40 bp, Artificial Sequence
  Description of Artificial Sequence: Synthetic primer
acccagagtagcggattctctggttttggatcaggcacag

SEQ ID NO: 28044 - DNA, 40 bp, Artificial Sequence
  Description of Artificial Sequence: Synthetic primer
ctgcattgcttggctggggcttgaatcaccaagtgctttc

SEQ ID NO: 28045 - DNA, 40 bp, Artificial Sequence
  Description of Artificial Sequence: Synthetic primer
ggacagtgtctggtgagatagcaggggctggacggaccac

SEQ ID NO: 28046 - DNA, 40 bp, Artificial Sequence
  Description of Artificial Sequence: Synthetic primer
aatgatagtgatccttggtcaaatggatagccctacacag

SEQ ID NO: 28047 - DNA, 40 bp, Artificial Sequence
  Description of Artificial Sequence: Synthetic primer
gtcagcttcaggcttgccccacttttggcatcgaggtctg

SEQ ID NO: 28048 - DNA, 40 bp, Artificial Sequence
  Description of Artificial Sequence: Synthetic primer
ttggagcctgggatcacaaggatcagggaaggttccaagg

SEQ ID NO: 28049 - DNA, 40 bp, Artificial Sequence
  Description of Artificial Sequence: Synthetic primer
accccgaatccctcctgcaggctcattgccacttttgtag

SEQ ID NO: 28050 - DNA, 40 bp, Artificial Sequence
  Description of Artificial Sequence: Synthetic primer
gacgccacaaggaggcctacgagtgcagcagccggtgttc

SEQ ID NO: 28051 - DNA, 40 bp, Artificial Sequence
  Description of Artificial Sequence: Synthetic primer
gatccccgacctgacgagcccctacctccccaacggatcg

SEQ ID NO: 28052 - DNA, 40 bp, Artificial Sequence
  Description of Artificial Sequence: Synthetic primer
gaaccttctgacttcttcggaatgtgacatcacgcagatg

SEQ ID NO: 28053 - DNA, 40 bp, Artificial Sequence
  Description of Artificial Sequence: Synthetic primer
gcaggtgcatttggagagaaattccgggggctgtccaaag

SEQ ID NO: 28054 - DNA, 40 bp, Artificial Sequence
  Description of Artificial Sequence: Synthetic primer
cgcccttcatccctccccaaccccaatctacacgatcttt

SEQ ID NO: 28055 - DNA, 40 bp, Artificial Sequence
  Description of Artificial Sequence: Synthetic primer
atcttatatgcacttggttgcacagaatgaggctaagagg

SEQ ID NO: 28056 - DNA, 40 bp, Artificial Sequence
  Description of Artificial Sequence: Synthetic primer
ctagtattaaaactgataaaagcaaagccatgcacaaaac

SEQ ID NO: 28057 - DNA, 40 bp, Artificial Sequence
  Description of Artificial Sequence: Synthetic primer
tacactctggaacaccggaagaccctcttttaaagcaaag

SEQ ID NO: 28058 - DNA, 40 bp, Artificial Sequence
  Description of Artificial Sequence: Synthetic primer
ggctttaaattaccatctcaataggcaagtttatctgaag

SEQ ID NO: 28059 - DNA, 40 bp, Artificial Sequence
  Description of Artificial Sequence: Synthetic primer
tttaaatggtttgactacctcagggaaactggctccattg

SEQ ID NO: 28060 - DNA, 40 bp, Artificial Sequence
  Description of Artificial Sequence: Synthetic primer
atgtgagccacgacttctacttcccaggttgattcagtcc

SEQ ID NO: 28061 - DNA, 40 bp, Artificial Sequence
  Description of Artificial Sequence: Synthetic primer
agtcctatcattcacaaagggaaaactacagccaccacac

SEQ ID NO: 28062 - DNA, 40 bp, Artificial Sequence
  Description of Artificial Sequence: Synthetic primer
tctccactggagagaaaggtcgagcacgctcctctgaaac

SEQ ID NO: 28063 - DNA, 40 bp, Artificial Sequence
  Description of Artificial Sequence: Synthetic primer
cagagccgagacggatcgggcagaacaaggacagggtgtg

SEQ ID NO: 28064 - DNA, 40 bp, Artificial Sequence
  Description of Artificial Sequence: Synthetic primer
cagccccaagcccctcgccctgcccggggcgcatgtggtg

SEQ ID NO: 28065 - DNA, 40 bp, Artificial Sequence
  Description of Artificial Sequence: Synthetic primer
taaataatttgggaaccattgccaagtctggtactaaagc

SEQ ID NO: 28066 - DNA, 40 bp, Artificial Sequence
  Description of Artificial Sequence: Synthetic primer
ggaagacaatgatcctgatggtccttttgctttccgtagg

SEQ ID NO: 28067 - DNA, 40 bp, Artificial Sequence
  Description of Artificial Sequence: Synthetic primer
catcaaaaaacacctgttggtccacgcccctgaagacaag

SEQ ID NO: 28068 - DNA, 40 bp, Artificial Sequence
  Description of Artificial Sequence: Synthetic primer
aaaccaacctaacaagaattaagcagagttgggggaagtg

SEQ ID NO: 28069 - DNA, 40 bp, Artificial Sequence
  Description of Artificial Sequence: Synthetic primer
cttcagctcagcacgggtcttctccaagtcttcctgtacc

SEQ ID NO: 28070 - DNA, 40 bp, Artificial Sequence
  Description of Artificial Sequence: Synthetic primer
ccagaggtaccaagccctgaaggcccacgcggaggagaag

SEQ ID NO: 28071 - DNA, 40 bp, Artificial Sequence
  Description of Artificial Sequence: Synthetic primer
tggtcaacttgactgcactccggggagaagaaaagagtgg

SEQ ID NO: 28072 - DNA, 40 bp, Artificial Sequence
  Description of Artificial Sequence: Synthetic primer
gcaggatttttaatttcatctgctagaataactggtccac

SEQ ID NO: 28073 - DNA, 40 bp, Artificial Sequence
  Description of Artificial Sequence: Synthetic primer
ggttcggtggggacttggctcccagaccctgccctctcag

SEQ ID NO: 28074 - DNA, 40 bp, Artificial Sequence
  Description of Artificial Sequence: Synthetic primer
ctcccctcagccacaatcaagagctggtcggctgcttctc

SEQ ID NO: 28075 - DNA, 40 bp, Artificial Sequence
  Description of Artificial Sequence: Synthetic primer
acagatgggtccagtcatcatctcctcctgaacagttatc

SEQ ID NO: 28076 - DNA, 40 bp, Artificial Sequence
  Description of Artificial Sequence: Synthetic primer
ggtcctcggactccagcagggccacttgcaccacgactac

SEQ ID NO: 28077 - DNA, 40 bp, Artificial Sequence
  Description of Artificial Sequence: Synthetic primer
ggagctgtgcagccgcgaggaggcgcgggaggtgttcgag

SEQ ID NO: 28078 - DNA, 40 bp, Artificial Sequence
  Description of Artificial Sequence: Synthetic primer
ggaggtgggttcgacctccggttcccccaccatgacaatg

SEQ ID NO: 28079 - DNA, 40 bp, Artificial Sequence
  Description of Artificial Sequence: Synthetic primer
tctttgtctatattttatacaaatacaacagtagtttgtg

SEQ ID NO: 28080 - DNA, 40 bp, Artificial Sequence
  Description of Artificial Sequence: Synthetic primer
tctggaggcagcccccgttctcctggctgcattcgttgac

SEQ ID NO: 28081 - DNA, 40 bp, Artificial Sequence
  Description of Artificial Sequence: Synthetic primer
cgcaagaggtgggggagaaagagagctgcatcggtacaag

SEQ ID NO: 28082 - DNA, 40 bp, Artificial Sequence
  Description of Artificial Sequence: Synthetic primer
ctggggcagggggaatatgcaagctaaagcccctctatac

SEQ ID NO: 28083 - DNA, 40 bp, Artificial Sequence
  Description of Artificial Sequence: Synthetic primer
gtgacacgcccacctgaccgggagccagcagtggggcttg

SEQ ID NO: 28084 - DNA, 40 bp, Artificial Sequence
  Description of Artificial Sequence: Synthetic primer
ggacccagcccaccactcccgactgcagccccggcctctg

SEQ ID NO: 28085 - DNA, 40 bp, Artificial Sequence
  Description of Artificial Sequence: Synthetic primer
cccccgcagcccgcctggggggtccggggcgcccggctgg

SEQ ID NO: 28086 - DNA, 40 bp, Artificial Sequence
  Description of Artificial Sequence: Synthetic primer
ggctttggctttgttacttttgatgaccatgatcctgtgg

SEQ ID NO: 28087 - DNA, 40 bp, Artificial Sequence
  Description of Artificial Sequence: Synthetic primer
tgatgcagaattatgcactgacatgaccctgggtgacagg

SEQ ID NO: 28088 - DNA, 40 bp, Artificial Sequence
  Description of Artificial Sequence: Synthetic primer
cccctggatttaatactacgacagccactttgggctttgg

SEQ ID NO: 28089 - DNA, 40 bp, Artificial Sequence
  Description of Artificial Sequence: Synthetic primer
tggctgtctccttgacccgcctcctagatcattgtccttg

SEQ ID NO: 28090 - DNA, 40 bp, Artificial Sequence
  Description of Artificial Sequence: Synthetic primer
cctctgtcaccaggacattcctggctgccaggtctcggtg

SEQ ID NO: 28091 - DNA, 40 bp, Artificial Sequence
  Description of Artificial Sequence: Synthetic primer
cacagtattcacaccagtgtggccctctgaatgtatgcac

SEQ ID NO: 28092 - DNA, 40 bp, Artificial Sequence
  Description of Artificial Sequence: Synthetic primer
caggtagatgtggatcatgggttgcccagttctcttgttc

SEQ ID NO: 28093 - DNA, 40 bp, Artificial Sequence
  Description of Artificial Sequence: Synthetic primer
ttcgaagatcaaaaaaggaatagaagcattcaggtaatag

SEQ ID NO: 28094 - DNA, 40 bp, Artificial Sequence
  Description of Artificial Sequence: Synthetic primer
ggtgggggtgtcctcaacagctgagcttgtcctagcagtg

SEQ ID NO: 28095 - DNA, 40 bp, Artificial Sequence
  Description of Artificial Sequence: Synthetic primer
cacacgtgattgaatggctcacttaagttgttgaatttcc

SEQ ID NO: 28096 - DNA, 40 bp, Artificial Sequence
  Description of Artificial Sequence: Synthetic primer
cacgagaccagtacaagcaaatctgtttttgagcctgaag

SEQ ID NO: 28097 - DNA, 40 bp, Artificial Sequence
  Description of Artificial Sequence: Synthetic primer
agtgcacaagtctgggtacctcagctctgagcggctgatc

SEQ ID NO: 28098 - DNA, 40 bp, Artificial Sequence
  Description of Artificial Sequence: Synthetic primer
tgtgatcacatggacgcctgctccaagaattggttttaag

SEQ ID NO: 28099 - DNA, 40 bp, Artificial Sequence
  Description of Artificial Sequence: Synthetic primer
aaagagattgctattattaaggttcttcaaaaccaacttc

SEQ ID NO: 28100 - DNA, 40 bp, Artificial Sequence
  Description of Artificial Sequence: Synthetic primer
tactagattctgcttctggaccctcaccaacttcatttac

SEQ ID NO: 28101 - DNA, 40 bp, Artificial Sequence
  Description of Artificial Sequence: Synthetic primer
gtcaaaaatatttatacattttatacttagttcttttttt

SEQ ID NO: 28102 - DNA, 40 bp, Artificial Sequence
  Description of Artificial Sequence: Synthetic primer
ctccaacatcggccgcgacaacccccagggcagcttcgac

SEQ ID NO: 28103 - DNA, 40 bp, Artificial Sequence
  Description of Artificial Sequence: Synthetic primer
gaggaatctgttcaacatgttgtcatgacagccattcaag

SEQ ID NO: 28104 - DNA, 40 bp, Artificial Sequence
  Description of Artificial Sequence: Synthetic primer
acccgccagagggcaagaggaaactgagccagaacgagac

SEQ ID NO: 28105 - DNA, 40 bp, Artificial Sequence
  Description of Artificial Sequence: Synthetic primer
gtcctcgcacagaggtctctgatgagtcactttcttgacc

SEQ ID NO: 28106 - DNA, 40 bp, Artificial Sequence
  Description of Artificial Sequence: Synthetic primer
cccggtcatcacggccatcagtccccgccgcagccctgtc

SEQ ID NO: 28107 - DNA, 40 bp, Artificial Sequence
  Description of Artificial Sequence: Synthetic primer
gttcaacctggttgccacataaaggaatctctctccttgg

SEQ ID NO: 28108 - DNA, 40 bp, Artificial Sequence
  Description of Artificial Sequence: Synthetic primer
ctcagggaagctgaccgactcctggcagaggctgagagtg

SEQ ID NO: 28109 - DNA, 40 bp, Artificial Sequence
  Description of Artificial Sequence: Synthetic primer
tccccagaggtccctgcggtgctggcagaagggtggaagg

SEQ ID NO: 28110 - DNA, 40 bp, Artificial Sequence
  Description of Artificial Sequence: Synthetic primer
cgtgttaagagtcccaaataagggaaggactctctgaaat

SEQ ID NO: 28111 - DNA, 40 bp, Artificial Sequence
  Description of Artificial Sequence: Synthetic primer
atccaggtcctgaggatcaataactttgaaccaaactgtc

SEQ ID NO: 28112 - DNA, 40 bp, Artificial Sequence
  Description of Artificial Sequence: Synthetic primer
tcggagctgagcggcgggaccggaggggatgaggaggaag

SEQ ID NO: 28113 - DNA, 40 bp, Artificial Sequence
  Description of Artificial Sequence: Synthetic primer
gaggaagagttaagaaaggccaacgcagcgcgaagtcaac

SEQ ID NO: 28114 - DNA, 40 bp, Artificial Sequence
  Description of Artificial Sequence: Synthetic primer
ccagccgtgagcccccacccccccagaagccacccccgcc

SEQ ID NO: 28115 - DNA, 40 bp, Artificial Sequence
  Description of Artificial Sequence: Synthetic primer
cctcaaaccgtctgcaatcagttacctaatctccaagtgc

SEQ ID NO: 28116 - DNA, 40 bp, Artificial Sequence
  Description of Artificial Sequence: Synthetic primer
agtgaatttctctgatagagtcttcaaagctgtttctgac

SEQ ID NO: 28117 - DNA, 40 bp, Artificial Sequence
  Description of Artificial Sequence: Synthetic primer
cgagggtgacccccatgctgccttctgtcatcgcctcgtc

SEQ ID NO: 28118 - DNA, 40 bp, Artificial Sequence
  Description of Artificial Sequence: Synthetic primer
tcatagttggcggtagagttcatggcatagaagacgttgg

SEQ ID NO: 28119 - DNA, 40 bp, Artificial Sequence
  Description of Artificial Sequence: Synthetic primer
gggcagaggccaaaggcaacagaagctggtcggaagagtc

SEQ ID NO: 28120 - DNA, 40 bp, Artificial Sequence
  Description of Artificial Sequence: Synthetic primer
tgacgaaggtgtctttaaagctgacccaggagatgtggac

SEQ ID NO: 28121 - DNA, 40 bp, Artificial Sequence
  Description of Artificial Sequence: Synthetic primer
gcttttgggtggcagccaagatgggtgagacattgttgga

SEQ ID NO: 28122 - DNA, 40 bp, Artificial Sequence
  Description of Artificial Sequence: Synthetic primer
tgctgtatgatgacaacagcatcatgaccttcaacctcag

SEQ ID NO: 28123 - DNA, 40 bp, Artificial Sequence
  Description of Artificial Sequence: Synthetic primer
aatagccacggggtagagctacagtgattaagaggaaagc

SEQ ID NO: 28124 - DNA, 40 bp, Artificial Sequence
  Description of Artificial Sequence: Synthetic primer
gagttaggtgaccatgagaattgctgtttgaggtccacac

SEQ ID NO: 28125 - DNA, 40 bp, Artificial Sequence
  Description of Artificial Sequence: Synthetic primer
gggagctgccactggtactgagctcagtgctgggggcctg

SEQ ID NO: 28126 - DNA, 40 bp, Artificial Sequence
  Description of Artificial Sequence: Synthetic primer
tcgggacatggccgggtacatgccagctcgagcagatttc

SEQ ID NO: 28127 - DNA, 40 bp, Artificial Sequence
  Description of Artificial Sequence: Synthetic primer
tggcgaggagttaggtctatgagatccatcaccaaagcag

SEQ ID NO: 28128 - DNA, 40 bp, Artificial Sequence
  Description of Artificial Sequence: Synthetic primer
catattgaccaacagagcgggtttgattatcttttgttac

SEQ ID NO: 28129 - DNA, 40 bp, Artificial Sequence
  Description of Artificial Sequence: Synthetic primer
tgttgatcctcctgcgtttacgaccccttttcttctttag

SEQ ID NO: 28130 - DNA, 40 bp, Artificial Sequence
  Description of Artificial Sequence: Synthetic primer
cattaagtattgtaaaatgaggagcttgaaaagaaacacc

SEQ ID NO: 28131 - DNA, 40 bp, Artificial Sequence
  Description of Artificial Sequence: Synthetic primer
ggagtgaggctgctgaggggtccagaaacccgagacaagc

SEQ ID NO: 28132 - DNA, 40 bp, Artificial Sequence
  Description of Artificial Sequence: Synthetic primer
agctgatgataagcctgcaggtcaaaccaaaagtacacac

SEQ ID NO: 28133 - DNA, 40 bp, Artificial Sequence
  Description of Artificial Sequence: Synthetic primer
ccgtcacatgagtcatctaaaacatcatgccttgttggtc

SEQ ID NO: 28134 - DNA, 40 bp, Artificial Sequence
  Description of Artificial Sequence: Synthetic primer
tggactggaggggcggtggagcccaaggcgggcctgttgt

SEQ ID NO: 28135 - DNA, 40 bp, Artificial Sequence
  Description of Artificial Sequence: Synthetic primer
tatctttatctttattcttgggttttttcaatttaccatc

SEQ ID NO: 28136 - DNA, 40 bp, Artificial Sequence
  Description of Artificial Sequence: Synthetic primer
ccttgcaggctcttaagttggaagggtttctgtaaaaagg

SEQ ID NO: 28137 - DNA, 40 bp, Artificial Sequence
  Description of Artificial Sequence: Synthetic primer
gtaacccgactccaagccaggactctgctgtcaccctcct

SEQ ID NO: 28138 - DNA, 40 bp, Artificial Sequence
  Description of Artificial Sequence: Synthetic primer
ctctgcttgatgctaaattccatccagcccagatgcttcc

SEQ ID NO: 28139 - DNA, 40 bp, Artificial Sequence
  Description of Artificial Sequence: Synthetic primer
agggctgctctcagcaagactgcagcagctgcacccagac

SEQ ID NO: 28140 - DNA, 40 bp, Artificial Sequence
  Description of Artificial Sequence: Synthetic primer
aaaaatagtaaaagctgctggagacactactgttattgaa

SEQ ID NO: 28141 - DNA, 40 bp, Artificial Sequence
  Description of Artificial Sequence: Synthetic primer
agtaggtgtctgcagcaggctgggtgggaaggtggactcg

SEQ ID NO: 28142 - DNA, 40 bp, Artificial Sequence
  Description of Artificial Sequence: Synthetic primer
taaggcagatttgccttacaggtggcctcagcttctaaac

SEQ ID NO: 28143 - DNA, 40 bp, Artificial Sequence
  Description of Artificial Sequence: Synthetic primer
gtgccagaggaccctctgctgaaagccaaacgccgacgag

SEQ ID NO: 28144 - DNA, 40 bp, Artificial Sequence
  Description of Artificial Sequence: Synthetic primer
ccatatcctcctcttcctcctccataaccggggctacctc

SEQ ID NO: 28145 - DNA, 40 bp, Artificial Sequence
  Description of Artificial Sequence: Synthetic primer
ctcagaatccaagcggagagagtcagcctctggttcagac

SEQ ID NO: 28146 - DNA, 40 bp, Artificial Sequence
  Description of Artificial Sequence: Synthetic primer
gtgagtaccggctcttcccgggtaaagtcttggtcaaaat

SEQ ID NO: 28147 - DNA, 40 bp, Artificial Sequence
  Description of Artificial Sequence: Synthetic primer
aggtggtgctatcatagaaagggtgggaaccagactgctg

SEQ ID NO: 28148 - DNA, 40 bp, Artificial Sequence
  Description of Artificial Sequence: Synthetic primer
cctcccgctctgaagcctgctgccgcctctgctccagtcg

SEQ ID NO: 28149 - DNA, 40 bp, Artificial Sequence
  Description of Artificial Sequence: Synthetic primer
ggcggcgcagttcctctgaatcaccttcatggcggtcagc

SEQ ID NO: 28150 - DNA, 40 bp, Artificial Sequence
  Description of Artificial Sequence: Synthetic primer
ctcgtcccagggccgctctccgcagacatgctagtgatcc

SEQ ID NO: 28151 - DNA, 40 bp, Artificial Sequence
  Description of Artificial Sequence: Synthetic primer
cagcccccgaaacttctcccccaacacccccgcccacttc

SEQ ID NO: 28152 - DNA, 40 bp, Artificial Sequence
  Description of Artificial Sequence: Synthetic primer
agcatgcctgatgtaccatatgaaccagatttggatatcg

SEQ ID NO: 28153 - DNA, 40 bp, Artificial Sequence
  Description of Artificial Sequence: Synthetic primer
taaatagaatgaaaagtttccaggtagtttaaaactccac

SEQ ID NO: 28154 - DNA, 40 bp, Artificial Sequence
  Description of Artificial Sequence: Synthetic primer
ggagctatctcccgccgcccagagtgatctgatcggaagc

SEQ ID NO: 28155 - DNA, 40 bp, Artificial Sequence
  Description of Artificial Sequence: Synthetic primer
gtgggatgttagccttgtccaggagggcatgtgtgtatgc

SEQ ID NO: 28156 - DNA, 40 bp, Artificial Sequence
  Description of Artificial Sequence: Synthetic primer
atatacattttattgatgagccactttgctatctctcctt

SEQ ID NO: 28157 - DNA, 40 bp, Artificial Sequence
  Description of Artificial Sequence: Synthetic primer
agaaaattaaaacagaagataccaagaaggagaagaaaag

SEQ ID NO: 28158 - DNA, 40 bp, Artificial Sequence
  Description of Artificial Sequence: Synthetic primer
ttcccttctggctgttcccctgctctgttgcctctctaag

SEQ ID NO: 28159 - DNA, 40 bp, Artificial Sequence
  Description of Artificial Sequence: Synthetic primer
gtcttgcaatctctgaagatcatgtggcctcagtgaaaaa

SEQ ID NO: 28160 - DNA, 40 bp, Artificial Sequence
  Description of Artificial Sequence: Synthetic primer
agccaaaagacttttgccagatttcatatttccccttttc

SEQ ID NO: 28161 - DNA, 40 bp, Artificial Sequence
  Description of Artificial Sequence: Synthetic primer
aaccaggacactaccctgagatctgcacagtcagaaggac

SEQ ID NO: 28162 - DNA, 40 bp, Artificial Sequence
  Description of Artificial Sequence: Synthetic primer
catgctgctctcctgcaagtaccgcggcgagctctgcggg

SEQ ID NO: 28163 - DNA, 40 bp, Artificial Sequence
  Description of Artificial Sequence: Synthetic primer
aaccttactttaggacatataacacttcttcttcctcctc

SEQ ID NO: 28164 - DNA, 40 bp, Artificial Sequence
  Description of Artificial Sequence: Synthetic primer
gatattagagactgtattttatatatgacgacttaagcta

SEQ ID NO: 28165 - DNA, 40 bp, Artificial Sequence
  Description of Artificial Sequence: Synthetic primer
agaaaattctccaatttcatctttggcaatactctctaac

SEQ ID NO: 28166 - DNA, 40 bp, Artificial Sequence
  Description of Artificial Sequence: Synthetic primer
aataggaaggaggggagcctggctgggcaaagggaaacag

SEQ ID NO: 28167 - DNA, 40 bp, Artificial Sequence
  Description of Artificial Sequence: Synthetic primer
gacttgagaaggtgatcgctctgctctcccaacccccttc

SEQ ID NO: 28168 - DNA, 40 bp, Artificial Sequence
  Description of Artificial Sequence: Synthetic primer
ggtgtacagacacgactggaactatgaacatctctttatg

SEQ ID NO: 28169 - DNA, 40 bp, Artificial Sequence
  Description of Artificial Sequence: Synthetic primer
ttaaatggtggtttttaggctggacccatgatttaagctg

SEQ ID NO: 28170 - DNA, 40 bp, Artificial Sequence
  Description of Artificial Sequence: Synthetic primer
cgactgaattgatatctcgttcattttgatcgtccacaag

SEQ ID NO: 28171 - DNA, 40 bp, Artificial Sequence
  Description of Artificial Sequence: Synthetic primer
ttcttttcagcggggagacaaatacaaatcaccttctttc

SEQ ID NO: 28172 - DNA, 40 bp, Artificial Sequence
  Description of Artificial Sequence: Synthetic primer
atctgacgaggagccacccccaggagaacaggcacagaag

SEQ ID NO: 28173 - DNA, 40 bp, Artificial Sequence
  Description of Artificial Sequence: Synthetic primer
ggacggtcgtgacggcccccgagggacatgagagaagagg

SEQ ID NO: 28174 - DNA, 40 bp, Artificial Sequence
  Description of Artificial Sequence: Synthetic primer
actgaataagaatcttgttctttgttctcatgagacacag

SEQ ID NO: 28175 - DNA, 40 bp, Artificial Sequence
  Description of Artificial Sequence: Synthetic primer
ccccaattccaaaattcagtgcatgaagtggggaaaaaag

SEQ ID NO: 28176 - DNA, 40 bp, Artificial Sequence
  Description of Artificial Sequence: Synthetic primer
tcaggaaggttgagttctgtgctgctaccttctactgatg

SEQ ID NO: 28177 - DNA, 40 bp, Artificial Sequence
  Description of Artificial Sequence: Synthetic primer
gagcatttcatcattgtaactggactccaggctgatgatc

SEQ ID NO: 28178 - DNA, 40 bp, Artificial Sequence
  Description of Artificial Sequence: Synthetic primer
tggaggagcgcaggccggccgactcggctcagctgctcag

SEQ ID NO: 28179 - DNA, 40 bp, Artificial Sequence
  Description of Artificial Sequence: Synthetic primer
cccggctcgcggactcccgcctcccggccggcggggcgcg

SEQ ID NO: 28180 - DNA, 40 bp, Artificial Sequence
  Description of Artificial Sequence: Synthetic primer
cgccaatgagaagctcttgactgtcttttgtggcatgctg

SEQ ID NO: 28181 - DNA, 40 bp, Artificial Sequence
  Description of Artificial Sequence: Synthetic primer
gagaacagtggcagaaggaatatctcggtgccatttgctc

SEQ ID NO: 28182 - DNA, 40 bp, Artificial Sequence
  Description of Artificial Sequence: Synthetic primer
tataggggctctcaaagcgatttccccaaccagacagagc

SEQ ID NO: 28183 - DNA, 40 bp, Artificial Sequence
  Description of Artificial Sequence: Synthetic primer
tcagacttctcttcttcaatccttggcactcctggtgcat

SEQ ID NO: 28184 - DNA, 40 bp, Artificial Sequence
  Description of Artificial Sequence: Synthetic primer
agcatactctgaatacgacttgataacttatcttctttgc

SEQ ID NO: 28185 - DNA, 40 bp, Artificial Sequence
  Description of Artificial Sequence: Synthetic primer
ttggggtctcggctgccaactgcaccacaggcgtgtcctc

SEQ ID NO: 28186 - DNA, 40 bp, Artificial Sequence
  Description of Artificial Sequence: Synthetic primer
gccctgctgggcagcccaactgctgggggagacgtttctg

SEQ ID NO: 28187 - DNA, 40 bp, Artificial Sequence
  Description of Artificial Sequence: Synthetic primer
ttaacaaagcattatacataacacctctaccaaactaaac

SEQ ID NO: 28188 - DNA, 40 bp, Artificial Sequence
  Description of Artificial Sequence: Synthetic primer
gcggcgcccgcctcgctcaggcggggcagccgtctgtgcg

SEQ ID NO: 28189 - DNA, 40 bp, Artificial Sequence
  Description of Artificial Sequence: Synthetic primer
aggagattctttctttgatgatcccattcctaagccagag

SEQ ID NO: 28190 - DNA, 40 bp, Artificial Sequence
  Description of Artificial Sequence: Synthetic primer
attctttttcaattcagcaaacatttgaaaatctatgatg

SEQ ID NO: 28191 - DNA, 40 bp, Artificial Sequence
  Description of Artificial Sequence: Synthetic primer
cagtgagcctctggagccttcttctctcccctcccaactc

SEQ ID NO: 28192 - DNA, 40 bp, Artificial Sequence
  Description of Artificial Sequence: Synthetic primer
actacttcctcctcccaactgcggggtcccagaaatcctc

SEQ ID NO: 28193 - DNA, 40 bp, Artificial Sequence
  Description of Artificial Sequence: Synthetic primer
ctggcgcgctccgataagtatgtacagaacatacatactg

SEQ ID NO: 28194 - DNA, 40 bp, Artificial Sequence
  Description of Artificial Sequence: Synthetic primer
tggatctggtgaaatctgtcacattaattcccatgaggtg

SEQ ID NO: 28195 - DNA, 40 bp, Artificial Sequence
  Description of Artificial Sequence: Synthetic primer
tcagttataagatgattgtttcacagaagccttaccactc

SEQ ID NO: 28196 - DNA, 40 bp, Artificial Sequence
  Description of Artificial Sequence: Synthetic primer
catagctaaaaataatagaatcctgtcataacccaatatc

SEQ ID NO: 28197 - DNA, 40 bp, Artificial Sequence
  Description of Artificial Sequence: Synthetic primer
aagagatttcagaagaaatttgagaaaatggctaaagagc

SEQ ID NO: 28198 - DNA, 40 bp, Artificial Sequence
  Description of Artificial Sequence: Synthetic primer
cccccaaacaaggaggagcaagagggcggcggagccagag

SEQ ID NO: 28199 - DNA, 40 bp, Artificial Sequence
  Description of Artificial Sequence: Synthetic primer
tttgttgtggtacaacagttgagagcagcaccaagtgcat

SEQ ID NO: 28200 - DNA, 40 bp, Artificial Sequence
  Description of Artificial Sequence: Synthetic primer
tcttgatcctcacctgctgcattccaaaacaagctagcac

SEQ ID NO: 28201 - DNA, 40 bp, Artificial Sequence
  Description of Artificial Sequence: Synthetic primer
tgtcaggattactgagtttcctgaagagcaggggactaac

SEQ ID NO: 28202 - DNA, 40 bp, Artificial Sequence
  Description of Artificial Sequence: Synthetic primer
cacacagatgggcatcttggctctccctgccagaaaaatg

SEQ ID NO: 28203 - DNA, 40 bp, Artificial Sequence
  Description of Artificial Sequence: Synthetic primer
ctcgctggcactggtccagaaatgctgctggctggaattg

SEQ ID NO: 28204 - DNA, 40 bp, Artificial Sequence
  Description of Artificial Sequence: Synthetic primer
agagcttgtatttctggtgctgctccttgattctgtttag

SEQ ID NO: 28205 - DNA, 40 bp, Artificial Sequence
  Description of Artificial Sequence: Synthetic primer
atttgctcagtacctcatcttaactgcctttggctttatg

SEQ ID NO: 28206 - DNA, 40 bp, Artificial Sequence
  Description of Artificial Sequence: Synthetic primer
aactcaattgttattcttcaacgttctttatatattctac

SEQ ID NO: 28207 - DNA, 40 bp, Artificial Sequence
  Description of Artificial Sequence: Synthetic primer
gtctgggtctgaagtgcccaggggaggctgcagagttaaa

SEQ ID NO: 28208 - DNA, 40 bp, Artificial Sequence
  Description of Artificial Sequence: Synthetic primer
ctctaggaaactggaagaaatggattccaaagagcagttc

SEQ ID NO: 28209 - DNA, 40 bp, Artificial Sequence
  Description of Artificial Sequence: Synthetic primer
gcgacggcgctggcggagacgccggctgctcctcccctcc

SEQ ID NO: 28210 - DNA, 40 bp, Artificial Sequence
  Description of Artificial Sequence: Synthetic primer
gccaattttaaaaactgccacttggagataaaaatcaagg

SEQ ID NO: 28211 - DNA, 40 bp, Artificial Sequence
  Description of Artificial Sequence: Synthetic primer
ctcgctggccatcgacgtgagccccggcttcgacgccagc

SEQ ID NO: 28212 - DNA, 40 bp, Artificial Sequence
  Description of Artificial Sequence: Synthetic primer
acccgagtgagcgctgccccctcacagagacctctttgcc

SEQ ID NO: 28213 - DNA, 40 bp, Artificial Sequence
  Description of Artificial Sequence: Synthetic primer
tttctttaaaagatatttaaattcatttgaaatatagttc

SEQ ID NO: 28214 - DNA, 40 bp, Artificial Sequence
  Description of Artificial Sequence: Synthetic primer
ttgaaagagacaatacatatgtcaagggcttgctctccaa

SEQ ID NO: 28215 - DNA, 40 bp, Artificial Sequence
  Description of Artificial Sequence: Synthetic primer
tgcatcggggctgggcgagggagaataagctgtaccatcg

SEQ ID NO: 28216 - DNA, 40 bp, Artificial Sequence
  Description of Artificial Sequence: Synthetic primer
ccaccagatgagaatgcgtccggctggcttgactctttag

SEQ ID NO: 28217 - DNA, 40 bp, Artificial Sequence
  Description of Artificial Sequence: Synthetic primer
gacagctcagtgcgccgggacaccggctcggccgccttgg

SEQ ID NO: 28218 - DNA, 40 bp, Artificial Sequence
  Description of Artificial Sequence: Synthetic primer
tcattagtagaacaaaagggcatggagtaaaaatgctaat

SEQ ID NO: 28219 - DNA, 40 bp, Artificial Sequence
  Description of Artificial Sequence: Synthetic primer
tttttgcttccctttggtcggccccgaggtctcttaggtg

SEQ ID NO: 28220 - DNA, 40 bp, Artificial Sequence
  Description of Artificial Sequence: Synthetic primer
cttacacctggaggtccaggagggccagggggaccagggg

SEQ ID NO: 28221 - DNA, 40 bp, Artificial Sequence
  Description of Artificial Sequence: Synthetic primer
actagacgtataatttcctatgatatagccatctggaacc

SEQ ID NO: 28222 - DNA, 40 bp, Artificial Sequence
  Description of Artificial Sequence: Synthetic primer
ctacaaagagcactgcatgaaagtgtgtgcaagatgactc

SEQ ID NO: 28223 - DNA, 40 bp, Artificial Sequence
  Description of Artificial Sequence: Synthetic primer
tatactgaggtccccccatgttcatctctaattcagatgg

SEQ ID NO: 28224 - DNA, 40 bp, Artificial Sequence
  Description of Artificial Sequence: Synthetic primer
tttcttctgtggtttcaaagcttaagccaccaataaagag

SEQ ID NO: 28225 - DNA, 40 bp, Artificial Sequence
  Description of Artificial Sequence: Synthetic primer
taggaaacactagaatgagaagtgttggccatgagaatcc

SEQ ID NO: 28226 - DNA, 40 bp, Artificial Sequence
  Description of Artificial Sequence: Synthetic primer
aagaaatgatgcggcgacagcaggaaggattcaagggaac

SEQ ID NO: 28227 - DNA, 40 bp, Artificial Sequence
  Description of Artificial Sequence: Synthetic primer
cagaaatctccaatgccatcgatcaatatgtgactggaac

SEQ ID NO: 28228 - DNA, 40 bp, Artificial Sequence
  Description of Artificial Sequence: Synthetic primer
cttcacagaaggttaatgacattgagagaaagacacattc

SEQ ID NO: 28229 - DNA, 40 bp, Artificial Sequence
  Description of Artificial Sequence: Synthetic primer
cacagccatgaggaactgcctgagcaagatcaaggccatc

SEQ ID NO: 28230 - DNA, 40 bp, Artificial Sequence
  Description of Artificial Sequence: Synthetic primer
ggagcagggcaacacggagctgatcaacgaccggctgaag

SEQ ID NO: 28231 - DNA, 40 bp, Artificial Sequence
  Description of Artificial Sequence: Synthetic primer
aaaatcaaaatggatttagagaaaaattatccgactcctc

SEQ ID NO: 28232 - DNA, 40 bp, Artificial Sequence
  Description of Artificial Sequence: Synthetic primer
tttccctcaaacaccaaggaacagtcctgaacaccacacg

SEQ ID NO: 28233 - DNA, 40 bp, Artificial Sequence
  Description of Artificial Sequence: Synthetic primer
atgaagaagtacttactgatccgaagatccaggcgctgct

SEQ ID NO: 28234 - DNA, 40 bp, Artificial Sequence
  Description of Artificial Sequence: Synthetic primer
ctcaagattgacaatgaaagtgggttctcctggggctacc

SEQ ID NO: 28235 - DNA, 40 bp, Artificial Sequence
  Description of Artificial Sequence: Synthetic primer
tgccatacatatgagatggtgcctgactgagagaagatcc

SEQ ID NO: 28236 - DNA, 40 bp, Artificial Sequence
  Description of Artificial Sequence: Synthetic primer
gtattagttgataaattaacagtaataacaagattgtatg

SEQ ID NO: 28237 - DNA, 40 bp, Artificial Sequence
  Description of Artificial Sequence: Synthetic primer
tgtctggggaccagtcaaggtgtgtgatgtagctggaatg

SEQ ID NO: 28238 - DNA, 40 bp, Artificial Sequence
  Description of Artificial Sequence: Synthetic primer
gtgaaactgtaaacagtaatggacgccaaattataggtag

SEQ ID NO: 28239 - DNA, 40 bp, Artificial Sequence
  Description of Artificial Sequence: Synthetic primer
tggagcggctgctggttggtgcctttccccctccttcctc

SEQ ID NO: 28240 - DNA, 40 bp, Artificial Sequence
  Description of Artificial Sequence: Synthetic primer
atcagtatctgactgctattaagcattagtattctctaag

SEQ ID NO: 28241 - DNA, 40 bp, Artificial Sequence
  Description of Artificial Sequence: Synthetic primer
agcttggcccagccgctgtattctccagtctgcaccaatg

SEQ ID NO: 28242 - DNA, 40 bp, Artificial Sequence
  Description of Artificial Sequence: Synthetic primer
aacacaatatggaattctgtatctgcatggaaatattaag

SEQ ID NO: 28243 - DNA, 40 bp, Artificial Sequence
  Description of Artificial Sequence: Synthetic primer
tgctacacaacctgagggagcggtacttctcagggctaat

SEQ ID NO: 28244 - DNA, 40 bp, Artificial Sequence
  Description of Artificial Sequence: Synthetic primer
tgaccttctgaagcagccacaacttagataatgtcagaac

SEQ ID NO: 28245 - DNA, 40 bp, Artificial Sequence
  Description of Artificial Sequence: Synthetic primer
atttggtcccaaattatatttaagtcttttttcttgcaac

SEQ ID NO: 28246 - DNA, 40 bp, Artificial Sequence
  Description of Artificial Sequence: Synthetic primer
aaatctagcttcaccatctgaatatccagaaaatggagag

SEQ ID NO: 28247 - DNA, 40 bp, Artificial Sequence
  Description of Artificial Sequence: Synthetic primer
cttcccattactgaccattaaaagctcaccactagagttc

SEQ ID NO: 28248 - DNA, 40 bp, Artificial Sequence
  Description of Artificial Sequence: Synthetic primer
ggcactgaaagaccagcagaggcataaggttcgggaagag

SEQ ID NO: 28249 - DNA, 40 bp, Artificial Sequence
  Description of Artificial Sequence: Synthetic primer
cacacaacaccccagcaaacctccgggcccccaggcatgg

SEQ ID NO: 28250 - DNA, 40 bp, Artificial Sequence
  Description of Artificial Sequence: Synthetic primer
ggctttgacaataccaaagagggtgttattgaagcaggag

SEQ ID NO: 28251 - DNA, 40 bp, Artificial Sequence
  Description of Artificial Sequence: Synthetic primer
gggagtaattaccaaactcaaggaacaatacaaaaaggag

SEQ ID NO: 28252 - DNA, 40 bp, Artificial Sequence
  Description of Artificial Sequence: Synthetic primer
gagtattttaagaaaccttttctaatgacagttacctcag

SEQ ID NO: 28253 - DNA, 40 bp, Artificial Sequence
  Description of Artificial Sequence: Synthetic primer
gtcggagtttctgagtttcaggattccggcacagtcaatg

SEQ ID NO: 28254 - DNA, 40 bp, Artificial Sequence
  Description of Artificial Sequence: Synthetic primer
agctggggttccttccagctccctggattgctgaactttg

SEQ ID NO: 28255 - DNA, 40 bp, Artificial Sequence
  Description of Artificial Sequence: Synthetic primer
tggagtgggcccggagaagagtatgtatgtggtgacaaag

SEQ ID NO: 28256 - DNA, 40 bp, Artificial Sequence
  Description of Artificial Sequence: Synthetic primer
gacaaagggagccagcttgggctgtgatgccacgtaattc

SEQ ID NO: 28257 - DNA, 40 bp, Artificial Sequence
  Description of Artificial Sequence: Synthetic primer
tgtgcgtctttccaatcccatgttcctccattcgtgtgtc

SEQ ID NO: 28258 - DNA, 40 bp, Artificial Sequence
  Description of Artificial Sequence: Synthetic primer
gctgttcaagcaaaaggaaaagtggagctcatgcaagcac

SEQ ID NO: 28259 - DNA, 40 bp, Artificial Sequence
  Description of Artificial Sequence: Synthetic primer
ccaggcaccccacactgtcctccatcttctttttcatgtc

SEQ ID NO: 28260 - DNA, 40 bp, Artificial Sequence
  Description of Artificial Sequence: Synthetic primer
agccatacattcttttgcctttttttcaaatccatgcaac

SEQ ID NO: 28261 - DNA, 40 bp, Artificial Sequence
  Description of Artificial Sequence: Synthetic primer
cgggtagaggcgaccggccagcaaccgcagcgtcggcgcc

SEQ ID NO: 28262 - DNA, 40 bp, Artificial Sequence
  Description of Artificial Sequence: Synthetic primer
atttctaattagccctacctatattccagaggagatggtc

SEQ ID NO: 28263 - DNA, 40 bp, Artificial Sequence
  Description of Artificial Sequence: Synthetic primer
taattcccttctcccgctggacgacatagtgagggtggtg

SEQ ID NO: 28264 - DNA, 40 bp, Artificial Sequence
  Description of Artificial Sequence: Synthetic primer
attaatttacttggcctgctactaaagtgcttaacataac

SEQ ID NO: 28265 - DNA, 40 bp, Artificial Sequence
  Description of Artificial Sequence: Synthetic primer
ataaactactgtagttaaagttttgtagaaacagcacagt

SEQ ID NO: 28266 - DNA, 40 bp, Artificial Sequence
  Description of Artificial Sequence: Synthetic primer
atgagcaactggaaaaaataataaaatgtaataggtctac

SEQ ID NO: 28267 - DNA, 40 bp, Artificial Sequence
  Description of Artificial Sequence: Synthetic primer
tcccatggaaaaccataaagattagaatctggtctcatac

SEQ ID NO: 28268 - DNA, 40 bp, Artificial Sequence
  Description of Artificial Sequence: Synthetic primer
ggacatgataaatggttttgggtaaggttcacaatttttc

SEQ ID NO: 28269 - DNA, 40 bp, Artificial Sequence
  Description of Artificial Sequence: Synthetic primer
ccgccaccgccgcggccatgtccgaggagcccgcgacgcc

SEQ ID NO: 28270 - DNA, 40 bp, Artificial Sequence
  Description of Artificial Sequence: Synthetic primer
aaagtggccctggccgttggaaaacaccagcagccatacc

SEQ ID NO: 28271 - DNA, 40 bp, Artificial Sequence
  Description of Artificial Sequence: Synthetic primer
ggcgtggggtcaaactgcgtgtgggccgttcccatgaaag

SEQ ID NO: 28272 - DNA, 40 bp, Artificial Sequence
  Description of Artificial Sequence: Synthetic primer
ctccctggaagctctcataccatctggtgcctccccccac

SEQ ID NO: 28273 - DNA, 40 bp, Artificial Sequence
  Description of Artificial Sequence: Synthetic primer
agtgaaatggagaaaggaggcattcagacagcagagttac

SEQ ID NO: 28274 - DNA, 40 bp, Artificial Sequence
  Description of Artificial Sequence: Synthetic primer
cagtgtgtcacgcggagtgagtgtggctgcaactttgagg

SEQ ID NO: 28275 - DNA, 40 bp, Artificial Sequence
  Description of Artificial Sequence: Synthetic primer
agaagttcgaagtgacctacgtgagcctgcagttctgctc

SEQ ID NO: 28276 - DNA, 40 bp, Artificial Sequence
  Description of Artificial Sequence: Synthetic primer
aaggtatatagtaaaagttgtaaaccatgtgtatgttctc

SEQ ID NO: 28277 - DNA, 40 bp, Artificial Sequence
  Description of Artificial Sequence: Synthetic primer
aggtggtcacttctcataaagcgttttgaacattctggac

SEQ ID NO: 28278 - DNA, 40 bp, Artificial Sequence
  Description of Artificial Sequence: Synthetic primer
cctcgcctccccaggccccccaccttttcaaactctcctc

SEQ ID NO: 28279 - DNA, 40 bp, Artificial Sequence
  Description of Artificial Sequence: Synthetic primer
acgccaactctgagcctggcggcgctgagaactcctcaaa

SEQ ID NO: 28280 - DNA, 40 bp, Artificial Sequence
  Description of Artificial Sequence: Synthetic primer
agctgtgatcaggctgagcaatcaagactggaggattctg

SEQ ID NO: 28281 - DNA, 40 bp, Artificial Sequence
  Description of Artificial Sequence: Synthetic primer
tgtgctggcggtaggtgtggaccacttccacgttactctg

SEQ ID NO: 28282 - DNA, 40 bp, Artificial Sequence
  Description of Artificial Sequence: Synthetic primer
ctagtttctatccacacagacgggaatgaacagctctctg

SEQ ID NO: 28283 - DNA, 40 bp, Artificial Sequence
  Description of Artificial Sequence: Synthetic primer
aaccttcagtgttcgaacatgagctctttcagtgtagaac

SEQ ID NO: 28284 - DNA, 40 bp, Artificial Sequence
  Description of Artificial Sequence: Synthetic primer
cccggagtacctgcagccgctgtcctccactcccgtcagc

SEQ ID NO: 28285 - DNA, 40 bp, Artificial Sequence
  Description of Artificial Sequence: Synthetic primer
cacatatttccaaattatattggtggtcatcagaagtagg

SEQ ID NO: 28286 - DNA, 40 bp, Artificial Sequence
  Description of Artificial Sequence: Synthetic primer
cttccttaacgcgcccgggcaggcggcccgcacttcctcc

SEQ ID NO: 28287 - DNA, 40 bp, Artificial Sequence
  Description of Artificial Sequence: Synthetic primer
gggacacctggacaatatttatttttgctgaaacccaatg

SEQ ID NO: 28288 - DNA, 40 bp, Artificial Sequence
  Description of Artificial Sequence: Synthetic primer
aacagtgatgttggctgtaagtcaaggcactcacaaaagc

SEQ ID NO: 28289 - DNA, 40 bp, Artificial Sequence
  Description of Artificial Sequence: Synthetic primer
atgtactccaggcttttgtcaaaatgctgctgtcagtgtc

SEQ ID NO: 28290 - DNA, 40 bp, Artificial Sequence
  Description of Artificial Sequence: Synthetic primer
agacctccaggctgtgaggcttgggttactccaaataatc

SEQ ID NO: 28291 - DNA, 40 bp, Artificial Sequence
  Description of Artificial Sequence: Synthetic primer
ttttgcgcttttccttttttctgcaagatacagagaattg

SEQ ID NO: 28292 - DNA, 40 bp, Artificial Sequence
  Description of Artificial Sequence: Synthetic primer
ttaacagatgttttactgtgggctctcctttacatcactg

SEQ ID NO: 28293 - DNA, 40 bp, Artificial Sequence
  Description of Artificial Sequence: Synthetic primer
tgaaaatgatgaggagatagccttttcaggcaaggacaag

SEQ ID NO: 28294 - DNA, 40 bp, Artificial Sequence
  Description of Artificial Sequence: Synthetic primer
agcactagcatattttgttgaggctgaatgagtaacacag

SEQ ID NO: 28295 - DNA, 40 bp, Artificial Sequence
  Description of Artificial Sequence: Synthetic primer
atcattcaccagacatcatggagcctatatatccttttgc

SEQ ID NO: 28296 - DNA, 40 bp, Artificial Sequence
  Description of Artificial Sequence: Synthetic primer
ggccaggctgggcaccccgtagtaggagacacggggcagt

SEQ ID NO: 28297 - DNA, 40 bp, Artificial Sequence
  Description of Artificial Sequence: Synthetic primer
cagagactgcagcccggactcaagtgggtgccagaaactc

SEQ ID NO: 28298 - DNA, 40 bp, Artificial Sequence
  Description of Artificial Sequence: Synthetic primer
tggtggtctcagtagcatctgtcacacgagcccttcttgg

SEQ ID NO: 28299 - DNA, 40 bp, Artificial Sequence
  Description of Artificial Sequence: Synthetic primer
acagacactcccgactcacgcccaccgtgggacacattag

SEQ ID NO: 28300 - DNA, 40 bp, Artificial Sequence
  Description of Artificial Sequence: Synthetic primer
cggttctttgcgctgcagccctcaggcgaccgcgcggagg

SEQ ID NO: 28301 - DNA, 40 bp, Artificial Sequence
  Description of Artificial Sequence: Synthetic primer
cgcttaagaaccggccagcccgggcccgggtgagtcagcg

SEQ ID NO: 28302 - DNA, 40 bp, Artificial Sequence
  Description of Artificial Sequence: Synthetic primer
gcggctaccgtgaaacgggctgcaaacacattccctgagc

SEQ ID NO: 28303 - DNA, 40 bp, Artificial Sequence; identical to SEQ ID NO: 18079
  Description of Artificial Sequence: Synthetic primer

SEQ ID NO: 28304 - DNA, 40 bp, Artificial Sequence
  Description of Artificial Sequence: Synthetic primer
aggtgccgcccccaaccgtgcccatggactactcctgggc

SEQ ID NO: 28305 - DNA, 40 bp, Artificial Sequence
  Description of Artificial Sequence: Synthetic primer
cctccttccccggcggcagtatgttccgccgcaccaagag

SEQ ID NO: 28306 - DNA, 40 bp, Artificial Sequence
  Description of Artificial Sequence: Synthetic primer
tttgaacatgtgaataagtttgtgaacagcatcaacaagc

SEQ ID NO: 28307 - DNA, 40 bp, Artificial Sequence
  Description of Artificial Sequence: Synthetic primer
tcttctccttgtccacctgaacgtagtccaccttctcatc

SEQ ID NO: 28308 - DNA, 40 bp, Artificial Sequence
  Description of Artificial Sequence: Synthetic primer
caatcttgtgcaacataaatagttattccttgtaaatcag

SEQ ID NO: 28309 - DNA, 40 bp, Artificial Sequence
  Description of Artificial Sequence: Synthetic primer
gtccaagggcaccaggggcaggggacttgatggcgatttg

SEQ ID NO: 28310 - DNA, 40 bp, Artificial Sequence
  Description of Artificial Sequence: Synthetic primer
gcaagggtgggagcagagatgggtgaatgggaggacatgg

SEQ ID NO: 28311 - DNA, 40 bp, Artificial Sequence
  Description of Artificial Sequence: Synthetic primer
aaactgcccctcaaggaagaaggcaggactctgcccaagg

SEQ ID NO: 28312 - DNA, 40 bp, Artificial Sequence
  Description of Artificial Sequence: Synthetic primer
tcatggtcgatgaggagctgaaggtgtggctcattgaggt

SEQ ID NO: 28313 - DNA, 40 bp, Artificial Sequence
  Description of Artificial Sequence: Synthetic primer
aatagagggtggagtaatttcctcgatgtttgagcagttc

SEQ ID NO: 28314 - DNA, 40 bp, Artificial Sequence
  Description of Artificial Sequence: Synthetic primer
ggagaaggaaaagaaggtggaacaatggaaagaaaagttc

SEQ ID NO: 28315 - DNA, 40 bp, Artificial Sequence
  Description of Artificial Sequence: Synthetic primer
agactgcaggatctccaccagctgcaggaggctcatcttg

SEQ ID NO: 28316 - DNA, 40 bp, Artificial Sequence
  Description of Artificial Sequence: Synthetic primer
tcaaagtactatgccactttaactatagacccatctcctc

SEQ ID NO: 28317 - DNA, 40 bp, Artificial Sequence
  Description of Artificial Sequence: Synthetic primer
agcattagatcactgtcatgaagccatagaaataacaagc

SEQ ID NO: 28318 - DNA, 40 bp, Artificial Sequence
  Description of Artificial Sequence: Synthetic primer
ttttctatttcatcatgcagttctgatagtcgagtttgtg

SEQ ID NO: 28319 - DNA, 40 bp, Artificial Sequence
  Description of Artificial Sequence: Synthetic primer
actgaaaattcccgtggggctggaatgcctgtccgtttag

SEQ ID NO: 28320 - DNA, 40 bp, Artificial Sequence
  Description of Artificial Sequence: Synthetic primer
tcaccacccgcctgctcaccacctgcatgctctcgttcag

SEQ ID NO: 28321 - DNA, 40 bp, Artificial Sequence
  Description of Artificial Sequence: Synthetic primer
gtcccgccaccccctggaggccagcgcgcatgcgcacgcg

SEQ ID NO: 28322 - DNA, 40 bp, Artificial Sequence
  Description of Artificial Sequence: Synthetic primer
cgcttctttgattttaaatgctgcattatgtcttctaatc

SEQ ID NO: 28323 - DNA, 40 bp, Artificial Sequence
  Description of Artificial Sequence: Synthetic primer
tggaagaagcaaaggtagacccccatcactcacctttgtc

SEQ ID NO: 28324 - DNA, 40 bp, Artificial Sequence
  Description of Artificial Sequence: Synthetic primer
aactcccaagtcaaaaagtaagaagaggaattctactcag

SEQ ID NO: 28325 - DNA, 40 bp, Artificial Sequence
  Description of Artificial Sequence: Synthetic primer
cgagttatttttgaattttgcttaaaatctatttttcata

SEQ ID NO: 28326 - DNA, 40 bp, Artificial Sequence
  Description of Artificial Sequence: Synthetic primer
tccctgtctggagggaggtggttggggtcttcagtttcag

SEQ ID NO: 28327 - DNA, 40 bp, Artificial Sequence
  Description of Artificial Sequence: Synthetic primer
tcaggcgtttattccccaccactttgtcaaacagctctcc

SEQ ID NO: 28328 - DNA, 40 bp, Artificial Sequence
  Description of Artificial Sequence: Synthetic primer
tagaatagtacaagactttttaaagcaattgtcctcacag

SEQ ID NO: 28329 - DNA, 40 bp, Artificial Sequence
  Description of Artificial Sequence: Synthetic primer
ccagaatttaaaggaccaaagccatgaaatgcatgagaac

SEQ ID NO: 28330 - DNA, 40 bp, Artificial Sequence
  Description of Artificial Sequence: Synthetic primer
gcaaggagcgggtgaccgacagcgagagtggggacagctc

SEQ ID NO: 28331 - DNA, 40 bp, Artificial Sequence
  Description of Artificial Sequence: Synthetic primer
ctccctcccggggtgccccttcttttttgacttcggagcc

SEQ ID NO: 28332 - DNA, 40 bp, Artificial Sequence
  Description of Artificial Sequence: Synthetic primer
gacaactgttaactctgttgatgctggctttaaattcttc

SEQ ID NO: 28333 - DNA, 40 bp, Artificial Sequence
  Description of Artificial Sequence: Synthetic primer
acgacgaagaaacccaaatccatagctgtccagagatgac

SEQ ID NO: 28334 - DNA, 40 bp, Artificial Sequence
  Description of Artificial Sequence: Synthetic primer
tccttcaccagccgccagcctggacagacagctactccac

SEQ ID NO: 28335 - DNA, 40 bp, Artificial Sequence; identical to SEQ ID NO: 15564
  Description of Artificial Sequence: Synthetic primer

SEQ ID NO: 28336 - DNA, 40 bp, Artificial Sequence
  Description of Artificial Sequence: Synthetic primer
agccaaacaacaacaaaaacaaaaaatgtgctgttcaagt

SEQ ID NO: 28337 - DNA, 40 bp, Artificial Sequence
  Description of Artificial Sequence: Synthetic primer
ggtaaaccaacagctcacaaaggagaaagagcactaccag

SEQ ID NO: 28338 - DNA, 40 bp, Artificial Sequence
  Description of Artificial Sequence: Synthetic primer
ggttcaggtttaatgccataaggccggctggagggcaagc

SEQ ID NO: 28339 - DNA, 40 bp, Artificial Sequence
  Description of Artificial Sequence: Synthetic primer
cttgatggtatcgaagtcattctcccccggcggtttcttg

SEQ ID NO: 28340 - DNA, 40 bp, Artificial Sequence
  Description of Artificial Sequence: Synthetic primer
ttggtctgggcttgtcggcaaatcgggggggttccgctgc

SEQ ID NO: 28341 - DNA, 40 bp, Artificial Sequence
  Description of Artificial Sequence: Synthetic primer
tttttttcgctgaggcggcctcaccaccgcgctcggctcg

SEQ ID NO: 28342 - DNA, 40 bp, Artificial Sequence
  Description of Artificial Sequence: Synthetic primer
ttcaggtaaatgttgaaaagcagatctcccaacaaactgg

SEQ ID NO: 28343 - DNA, 40 bp, Artificial Sequence
  Description of Artificial Sequence: Synthetic primer
agcagttctgcaaaggaacaccaggcagattcatttatac

SEQ ID NO: 28344 - DNA, 40 bp, Artificial Sequence
  Description of Artificial Sequence: Synthetic primer
ctaaaggatttaattacaaagatgcaactgcaaagagaag

SEQ ID NO: 28345 - DNA, 40 bp, Artificial Sequence
  Description of Artificial Sequence: Synthetic primer
acgccggccttccccccgcaggcgggggcgttatgggacg

SEQ ID NO: 28346 - DNA, 40 bp, Artificial Sequence
  Description of Artificial Sequence: Synthetic primer
ttgccatagggcctggttaaaactttctcttaggtttcag

SEQ ID NO: 28347 - DNA, 40 bp, Artificial Sequence
  Description of Artificial Sequence: Synthetic primer
gaagtcaatgaatccctggaatattgtcccagaatccttc

SEQ ID NO: 28348 - DNA, 40 bp, Artificial Sequence
  Description of Artificial Sequence: Synthetic primer
atagggcgggcagtcactgctggctgctggcagcctcagg

SEQ ID NO: 28349 - DNA, 40 bp, Artificial Sequence
  Description of Artificial Sequence: Synthetic primer
tcaaatgaattctgttcatttataataaatgcatatattg

SEQ ID NO: 28350 - DNA, 40 bp, Artificial Sequence
  Description of Artificial Sequence: Synthetic primer
ggagtgtaataattcaccatagtaacggcagcttcctcag

SEQ ID NO: 28351 - DNA, 40 bp, Artificial Sequence
  Description of Artificial Sequence: Synthetic primer
tttgaacagcgccaccattgcctggagttggctaaagaag

SEQ ID NO: 28352 - DNA, 40 bp, Artificial Sequence
  Description of Artificial Sequence: Synthetic primer
cttgaccagcttgccttcacagatgagcacgttcctagcc

SEQ ID NO: 28353 - DNA, 40 bp, Artificial Sequence
  Description of Artificial Sequence: Synthetic primer
cttgttcctccttctcccagcagctagcttgttccattag

SEQ ID NO: 28354 - DNA, 40 bp, Artificial Sequence
  Description of Artificial Sequence: Synthetic primer
actattggattgatctgcacaaatacctttgaagagtacg

SEQ ID NO: 28355 - DNA, 40 bp, Artificial Sequence
  Description of Artificial Sequence: Synthetic primer
gaaaaaggtccatttttctctggtttgtcagtataaaagg

SEQ ID NO: 28356 - DNA, 40 bp, Artificial Sequence
  Description of Artificial Sequence: Synthetic primer
tacgggaatgtgatggtattcacggactggatttatcgac

SEQ ID NO: 28357 - DNA, 40 bp, Artificial Sequence
  Description of Artificial Sequence: Synthetic primer
tcatctttccaaaaagtgaaagaagatttggtgccatcag

SEQ ID NO: 28358 - DNA, 40 bp, Artificial Sequence
  Description of Artificial Sequence: Synthetic primer
tcatgccggacggggaggtggtagggaggccgtgcactcg

SEQ ID NO: 28359 - DNA, 40 bp, Artificial Sequence
  Description of Artificial Sequence: Synthetic primer
tcccccaaagtatcatgtgtgaacctacaacaccctgacc

SEQ ID NO: 28360 - DNA, 40 bp, Artificial Sequence
  Description of Artificial Sequence: Synthetic primer
ctatttctagttcagtcataagactctcaacatttccatc

SEQ ID NO: 28361 - DNA, 40 bp, Artificial Sequence
  Description of Artificial Sequence: Synthetic primer
ttcttctctcacatattcctccctactcccccacccaatc

SEQ ID NO: 28362 - DNA, 40 bp, Artificial Sequence
  Description of Artificial Sequence: Synthetic primer
attatagaggtctacagtatttgtgttggcatagtttttg

SEQ ID NO: 28363 - DNA, 40 bp, Artificial Sequence
  Description of Artificial Sequence: Synthetic primer
caagccgcagctctggccgcaggccccacccctcccgggc

SEQ ID NO: 28364 - DNA, 40 bp, Artificial Sequence
  Description of Artificial Sequence: Synthetic primer
caagccaaggtccaggttcagcaagatggtggccgtgaag

SEQ ID NO: 28365 - DNA, 40 bp, Artificial Sequence
  Description of Artificial Sequence: Synthetic primer
ggtggcagtggcagtgaagagtacactatatttcgccaag

SEQ ID NO: 28366 - DNA, 40 bp, Artificial Sequence
  Description of Artificial Sequence: Synthetic primer
tcccaaaaagcaccaccaagtaatccggagaggccgtcat

SEQ ID NO: 28367 - DNA, 40 bp, Artificial Sequence
  Description of Artificial Sequence: Synthetic primer
ttggagaaagagaaagccaagttgggacgcagtgaagaac

SEQ ID NO: 28368 - DNA, 40 bp, Artificial Sequence
  Description of Artificial Sequence: Synthetic primer
attttaatatttggctgatatgaatgcattgcctcaaagg

SEQ ID NO: 28369 - DNA, 40 bp, Artificial Sequence
  Description of Artificial Sequence: Synthetic primer
atttatgctgtcttagcaatatgacaataatcctctgtag

SEQ ID NO: 28370 - DNA, 40 bp, Artificial Sequence
  Description of Artificial Sequence: Synthetic primer
ccttaacaaacgtaatttgttatatcagcagacactccag

SEQ ID NO: 28371 - DNA, 40 bp, Artificial Sequence
  Description of Artificial Sequence: Synthetic primer
tatatacgagtatctctatatatagtactaatggatttgg

SEQ ID NO: 28372 - DNA, 40 bp, Artificial Sequence
  Description of Artificial Sequence: Synthetic primer
aggagacacttgctccaggaagccaggagcccagacccag

SEQ ID NO: 28373 - DNA, 40 bp, Artificial Sequence
  Description of Artificial Sequence: Synthetic primer
ccccttctctaagcgcatcaagctcgagaaggagttcgac

SEQ ID NO: 28374 - DNA, 40 bp, Artificial Sequence
  Description of Artificial Sequence: Synthetic primer
gctttcctttggggtgccaggcagcgaggccccccacccc

SEQ ID NO: 28375 - DNA, 40 bp, Artificial Sequence
  Description of Artificial Sequence: Synthetic primer
aggggtcaaggcgggggcgcccctgtctcagagagcagcc

SEQ ID NO: 28376 - DNA, 40 bp, Artificial Sequence
  Description of Artificial Sequence: Synthetic primer
cgctcaggacacagacgaactcagctttaatgccaatgac

SEQ ID NO: 28377 - DNA, 40 bp, Artificial Sequence
  Description of Artificial Sequence: Synthetic primer
ggttcgagtaaagctggtttccggcatgtctttgtaaacc

SEQ ID NO: 28378 - DNA, 40 bp, Artificial Sequence
  Description of Artificial Sequence: Synthetic primer
taaggtacacactacatactaaggtcggccatcattcctg

SEQ ID NO: 28379 - DNA, 40 bp, Artificial Sequence
  Description of Artificial Sequence: Synthetic primer
tcacacagtcgcagagatgcaggccttgccagtggtgtgc

SEQ ID NO: 28380 - DNA, 40 bp, Artificial Sequence
  Description of Artificial Sequence: Synthetic primer
cctcagatgtttgagtctgcttaactgtttcagtttcatc

SEQ ID NO: 28381 - DNA, 40 bp, Artificial Sequence
  Description of Artificial Sequence: Synthetic primer
caggggaatgatttggataatgaccctaaccgtgggaatc

SEQ ID NO: 28382 - DNA, 40 bp, Artificial Sequence
  Description of Artificial Sequence: Synthetic primer
ttgttccagaggcatatgcacttttccctccaggactagg

SEQ ID NO: 28383 - DNA, 40 bp, Artificial Sequence
  Description of Artificial Sequence: Synthetic primer
atgcaggaaatatctggctgccttagtaagcttcggcttg

SEQ ID NO: 28384 - DNA, 40 bp, Artificial Sequence
  Description of Artificial Sequence: Synthetic primer
caattcttaggttttggctcagatgaagaagtcagagtgc

SEQ ID NO: 28385 - DNA, 40 bp, Artificial Sequence
  Description of Artificial Sequence: Synthetic primer
caaacttcagtgtagatccaggggttgttagagatgaagg

SEQ ID NO: 28386 - DNA, 40 bp, Artificial Sequence
  Description of Artificial Sequence: Synthetic primer
gggtcccgtgagggggcgttacttcttccagccccagctc

SEQ ID NO: 28387 - DNA, 40 bp, Artificial Sequence
  Description of Artificial Sequence: Synthetic primer
ttttcaaaaagggacagatcatatttattaaaaataattc

SEQ ID NO: 28388 - DNA, 40 bp, Artificial Sequence
  Description of Artificial Sequence: Synthetic primer
tcaagaattatggattgtgttggttgttttaaatgtcgtc

SEQ ID NO: 28389 - DNA, 40 bp, Artificial Sequence
  Description of Artificial Sequence: Synthetic primer
agctacatctccagagtgtctggaggagggaccaaagtcc

SEQ ID NO: 28390 - DNA, 40 bp, Artificial Sequence
  Description of Artificial Sequence: Synthetic primer
ggagactgagagtatagggtctttgtaggcagagaaggag

SEQ ID NO: 28391 - DNA, 40 bp, Artificial Sequence
  Description of Artificial Sequence: Synthetic primer
ttgaaactactgtctgcagcttggaagaattattgagaac

SEQ ID NO: 28392 - DNA, 40 bp, Artificial Sequence
  Description of Artificial Sequence: Synthetic primer
gcatgttggcaaacacagacactccagcaattgcacaaag

SEQ ID NO: 28393 - DNA, 40 bp, Artificial Sequence
  Description of Artificial Sequence: Synthetic primer
aaaactccaaatctcgaatcttctctccctgagcctccac

SEQ ID NO: 28394 - DNA, 40 bp, Artificial Sequence
  Description of Artificial Sequence: Synthetic primer
gatagtaacgattactgctatgcctcgggataaagcacag

SEQ ID NO: 28395 - DNA, 40 bp, Artificial Sequence
  Description of Artificial Sequence: Synthetic primer
agggtagcttgcacctgtcccaactgtaaagaaggtggtg

SEQ ID NO: 28396 - DNA, 40 bp, Artificial Sequence
  Description of Artificial Sequence: Synthetic primer
ctacagcaagaggaagtccaaaagaagaatgctgagcaag

SEQ ID NO: 28397 - DNA, 40 bp, Artificial Sequence
  Description of Artificial Sequence: Synthetic primer
gctgatcaagaaggcggaccagaagggagtgaccatcatc

SEQ ID NO: 28398 - DNA, 40 bp, Artificial Sequence
  Description of Artificial Sequence: Synthetic primer
tgggctcatagtggtccattaaaactgttcttgggtcagg

SEQ ID NO: 28399 - DNA, 40 bp, Artificial Sequence
  Description of Artificial Sequence: Synthetic primer
tctactgcacaggcctctccagtgaacagggtctgttcac

SEQ ID NO: 28400 - DNA, 40 bp, Artificial Sequence
  Description of Artificial Sequence: Synthetic primer
agggattgcctttgcactgaacacaaagaccagctacacc

SEQ ID NO: 28401 - DNA, 40 bp, Artificial Sequence
  Description of Artificial Sequence: Synthetic primer
tggtggcggcgcggggctcagcccgtggtcatcgaggtgg

SEQ ID NO: 28402 - DNA, 40 bp, Artificial Sequence
  Description of Artificial Sequence: Synthetic primer
cacttttacagagttaatactaaaattacaaattgatgac

SEQ ID NO: 28403 - DNA, 40 bp, Artificial Sequence
  Description of Artificial Sequence: Synthetic primer
agaagtagatctgcttcacaagaaaatcagagggagtagg

SEQ ID NO: 28404 - DNA, 40 bp, Artificial Sequence
  Description of Artificial Sequence: Synthetic primer
cacagattcagaagtggccacaagaggagaaaagggagtc

SEQ ID NO: 28405 - DNA, 40 bp, Artificial Sequence
  Description of Artificial Sequence: Synthetic primer
agtgagaaatgtcacctgacttcataagaccttctagcac

SEQ ID NO: 28406 - DNA, 40 bp, Artificial Sequence
  Description of Artificial Sequence: Synthetic primer
ttccccatcgtttgtccagtcagatccggattcatcacac

SEQ ID NO: 28407 - DNA, 40 bp, Artificial Sequence
  Description of Artificial Sequence: Synthetic primer
gaaatgttcaggacttcaaacgagcttctgaagaaatcac

SEQ ID NO: 28408 - DNA, 40 bp, Artificial Sequence
  Description of Artificial Sequence: Synthetic primer
gtttcataatcttatgaacaagaaatttcagcctgttcta

SEQ ID NO: 28409 - DNA, 40 bp, Artificial Sequence
  Description of Artificial Sequence: Synthetic primer
tggacagcaaaactttctgccgggctcagatctccatgac

SEQ ID NO: 28410 - DNA, 40 bp, Artificial Sequence
  Description of Artificial Sequence: Synthetic primer
ccagcggggcagcttcccccgcttgtccccacgggcaaac

SEQ ID NO: 28411 - DNA, 40 bp, Artificial Sequence
  Description of Artificial Sequence: Synthetic primer
gcaaaattatggttcccacaccccaaccccaaatgaaacc

SEQ ID NO: 28412 - DNA, 40 bp, Artificial Sequence
  Description of Artificial Sequence: Synthetic primer
ctcatcgtctttgtccacgcgctggagcagcagaaggact

SEQ ID NO: 28413 - DNA, 40 bp, Artificial Sequence
  Description of Artificial Sequence: Synthetic primer
gtgtctgcggggatcagagcgcacagggagtgcacatatc

SEQ ID NO: 28414 - DNA, 40 bp, Artificial Sequence
  Description of Artificial Sequence: Synthetic primer
ttatgcctgaaatctggcaaaccgaaaaatgttgctattg

SEQ ID NO: 28415 - DNA, 40 bp, Artificial Sequence
  Description of Artificial Sequence: Synthetic primer
tttaggactagtccaaggccagttgccagtttggtctaag

SEQ ID NO: 28416 - DNA, 40 bp, Artificial Sequence
  Description of Artificial Sequence: Synthetic primer
taatgaaggtttatgggagatagataacaatccaaaagtg

SEQ ID NO: 28417 - DNA, 40 bp, Artificial Sequence
  Description of Artificial Sequence: Synthetic primer
gacagaggaaaagaaaatatactaagtctttggcttctgg

SEQ ID NO: 28418 - DNA, 40 bp, Artificial Sequence
  Description of Artificial Sequence: Synthetic primer
ggagtcatgcaatcacagcaacagcccttccctggtcacg

SEQ ID NO: 28419 - DNA, 40 bp, Artificial Sequence
  Description of Artificial Sequence: Synthetic primer
gaggtctgccattcacaaaggcccctcccagctggttcag

SEQ ID NO: 28420 - DNA, 40 bp, Artificial Sequence
  Description of Artificial Sequence: Synthetic primer
aaatctgggaagatgtagttggggacatggaacctagagc

SEQ ID NO: 28421 - DNA, 40 bp, Artificial Sequence
  Description of Artificial Sequence: Synthetic primer
gttcctccacatcaaagcagaagaagaccgaagggaagac

SEQ ID NO: 28422 - DNA, 40 bp, Artificial Sequence
  Description of Artificial Sequence: Synthetic primer
acggcagtcatgtctcatgcaatctaccctggtgttcctg

SEQ ID NO: 28423 - DNA, 40 bp, Artificial Sequence
  Description of Artificial Sequence: Synthetic primer
ttcacttaaatggagtagagtgaataatgtaaggacactc

SEQ ID NO: 28424 - DNA, 40 bp, Artificial Sequence
  Description of Artificial Sequence: Synthetic primer
ttcctttttccactggtttctggtgacagctcctgccatt

SEQ ID NO: 28425 - DNA, 40 bp, Artificial Sequence
  Description of Artificial Sequence: Synthetic primer
attacagaggttcctctgtgcaaagctccccccatagcac

SEQ ID NO: 28426 - DNA, 40 bp, Artificial Sequence
  Description of Artificial Sequence: Synthetic primer
actgacgcgtacctgccatcaggatcctcgtttgtttctg

SEQ ID NO: 28427 - DNA, 40 bp, Artificial Sequence
  Description of Artificial Sequence: Synthetic primer
tcactggttgggaacgaacacgtgcagctgccttccatgc

SEQ ID NO: 28428 - DNA, 40 bp, Artificial Sequence
  Description of Artificial Sequence: Synthetic primer
acaggtcgaggcatggagttcaagctgatagaaccggaag

SEQ ID NO: 28429 - DNA, 40 bp, Artificial Sequence
  Description of Artificial Sequence: Synthetic primer
tatcattaaacagtgatacatcattaatctttgtcagaat

SEQ ID NO: 28430 - DNA, 40 bp, Artificial Sequence
  Description of Artificial Sequence: Synthetic primer
gtaaaagtttatataatgcccaaacctgcacggcgctaag

SEQ ID NO: 28431 - DNA, 40 bp, Artificial Sequence
  Description of Artificial Sequence: Synthetic primer
ggccatttttcttagagggcaaaaacgttagaataggtag

SEQ ID NO: 28432 - DNA, 40 bp, Artificial Sequence
  Description of Artificial Sequence: Synthetic primer
tctagaaagaacccagctcgcacatgccgtgacttgagac

SEQ ID NO: 28433 - DNA, 40 bp, Artificial Sequence
  Description of Artificial Sequence: Synthetic primer
caaacactatagggcttgggtctctgcactcactgtcagc

SEQ ID NO: 28434 - DNA, 40 bp, Artificial Sequence
  Description of Artificial Sequence: Synthetic primer
gccttcgaactttagtagccaccgcacctagttaaattgc

SEQ ID NO: 28435 - DNA, 40 bp, Artificial Sequence
  Description of Artificial Sequence: Synthetic primer
ggggtgaaaggactagaaaaacaaaaatagaattttcaac

SEQ ID NO: 28436 - DNA, 40 bp, Artificial Sequence
  Description of Artificial Sequence: Synthetic primer
ctcctgacacagactgggcccgcttgctgcaggaccaccc

SEQ ID NO: 28437 - DNA, 40 bp, Artificial Sequence
  Description of Artificial Sequence: Synthetic primer
ctctaatcttcggttttcaacttgaagttggtgtaatgac

SEQ ID NO: 28438 - DNA, 40 bp, Artificial Sequence
  Description of Artificial Sequence: Synthetic primer
gggagggggcttgctcttcatgggcgctggctccttcttg

SEQ ID NO: 28439 - DNA, 40 bp, Artificial Sequence
  Description of Artificial Sequence: Synthetic primer
atccacaaaactcaagattgggagctctttgtgatcaagc

SEQ ID NO: 28440 - DNA, 40 bp, Artificial Sequence
  Description of Artificial Sequence: Synthetic primer
acaagtgctctcaagagtatttgcttagaggccggctgtg

SEQ ID NO: 28441 - DNA, 40 bp, Artificial Sequence
  Description of Artificial Sequence: Synthetic primer
aggccgacagccagctgcagcctcacggcggagacctcac

SEQ ID NO: 28442 - DNA, 40 bp, Artificial Sequence
  Description of Artificial Sequence: Synthetic primer
ggctcttttgtgtaatctgtggcaatcctggaattgtgtg

SEQ ID NO: 28443 - DNA, 40 bp, Artificial Sequence
  Description of Artificial Sequence: Synthetic primer
aaggacagccaacaaggcccctgggagtaaaggcgtgaag

SEQ ID NO: 28444 - DNA, 40 bp, Artificial Sequence
  Description of Artificial Sequence: Synthetic primer
gtcctgggggaccagtccgtccagcagcaccagggaaacc

SEQ ID NO: 28445 - DNA, 40 bp, Artificial Sequence
  Description of Artificial Sequence: Synthetic primer
aaggaaattgtgtaattatagactttttattttaaataag

SEQ ID NO: 28446 - DNA, 40 bp, Artificial Sequence
  Description of Artificial Sequence: Synthetic primer
ctgggctcgacgggaggcaaagtgttcggagagggcactg

SEQ ID NO: 28447 - DNA, 40 bp, Artificial Sequence
  Description of Artificial Sequence: Synthetic primer
aattcagcctgcatcattgggctgaactggtgctccaagg

SEQ ID NO: 28448 - DNA, 40 bp, Artificial Sequence
  Description of Artificial Sequence: Synthetic primer
tacatttcactatgtgctggtaaattcactccatcgaatc

SEQ ID NO: 28449 - DNA, 40 bp, Artificial Sequence; identical to SEQ ID NO: 28381
  Description of Artificial Sequence: Synthetic primer

SEQ ID NO: 28450 - DNA, 40 bp, Artificial Sequence
  Description of Artificial Sequence: Synthetic primer
gaatggtcctgggggctgtgggacaagggaggactgtgtg

SEQ ID NO: 28451 - DNA, 40 bp, Artificial Sequence
  Description of Artificial Sequence: Synthetic primer
tgtcttaagacattttttcaatatcacaaaaagattttac

SEQ ID NO: 28452 - DNA, 40 bp, Artificial Sequence
  Description of Artificial Sequence: Synthetic primer
ctgctttccacggagtggcatattgtccagctccactttg

SEQ ID NO: 28453 - DNA, 40 bp, Artificial Sequence
  Description of Artificial Sequence: Synthetic primer
agagaattactgtccagacaaaaggaagctatgaaagcag

SEQ ID NO: 28454 - DNA, 40 bp, Artificial Sequence
  Description of Artificial Sequence: Synthetic primer
tggagaaaagggcttctggatcacacacaaacttgtagac

SEQ ID NO: 28455 - DNA, 40 bp, Artificial Sequence
  Description of Artificial Sequence: Synthetic primer
ctcatctttctgcccggctacatcagccttcaagaatcag

SEQ ID NO: 28456 - DNA, 40 bp, Artificial Sequence
  Description of Artificial Sequence: Synthetic primer
gcacaaatacagcccctctgacgtcttcatcggctaccac

SEQ ID NO: 28457 - DNA, 40 bp, Artificial Sequence
  Description of Artificial Sequence: Synthetic primer
ttaaagcatggacgtaactttaaggagactgagaaaacat

SEQ ID NO: 28458 - DNA, 40 bp, Artificial Sequence
  Description of Artificial Sequence: Synthetic primer
atcttcgccaagatgaaaggttatccccattggccagctc

SEQ ID NO: 28459 - DNA, 40 bp, Artificial Sequence
  Description of Artificial Sequence: Synthetic primer
cacaagatctgtttgtgaaagcctgatttaaaaagaaaaa

SEQ ID NO: 28460 - DNA, 40 bp, Artificial Sequence
  Description of Artificial Sequence: Synthetic primer
gaaagtgcggcagcggcggctgcgcttggtgccaggcggc

SEQ ID NO: 28461 - DNA, 40 bp, Artificial Sequence
  Description of Artificial Sequence: Synthetic primer
acctgtgtgagatggcaaataaactcaagaagaataaacc

SEQ ID NO: 28462 - DNA, 40 bp, Artificial Sequence
  Description of Artificial Sequence: Synthetic primer
gtagtttaaactctttaaccttttccttgccgtgtatgag

SEQ ID NO: 28463 - DNA, 40 bp, Artificial Sequence
  Description of Artificial Sequence: Synthetic primer
tggaaagttaaggtcgatgaatcacacaagactattaaac

SEQ ID NO: 28464 - DNA, 40 bp, Artificial Sequence
  Description of Artificial Sequence: Synthetic primer
ttcctcactggaaagcagcggggcttcaggccaccatgag

SEQ ID NO: 28465 - DNA, 40 bp, Artificial Sequence
  Description of Artificial Sequence: Synthetic primer
acgagcgctgcactaacgcaggatccggctgccgaaggtc

SEQ ID NO: 28466 - DNA, 40 bp, Artificial Sequence
  Description of Artificial Sequence: Synthetic primer
tgatctccattcctcgcaagggaagcttgatttgaaactg

SEQ ID NO: 28467 - DNA, 40 bp, Artificial Sequence
  Description of Artificial Sequence: Synthetic primer
acattaacgaagagcagattctcatcaacgaccggaacac

SEQ ID NO: 28468 - DNA, 40 bp, Artificial Sequence
  Description of Artificial Sequence: Synthetic primer
tgcagctgcaccgcagcatgaagccagccggctgggacgc

SEQ ID NO: 28469 - DNA, 40 bp, Artificial Sequence
  Description of Artificial Sequence: Synthetic primer
agcttcggctgaatcttcttctttagggactcctgctctc

SEQ ID NO: 28470 - DNA, 40 bp, Artificial Sequence
  Description of Artificial Sequence: Synthetic primer
gatctgtgccggcttcctgcaggggaacgtcgattcttgc

SEQ ID NO: 28471 - DNA, 40 bp, Artificial Sequence
  Description of Artificial Sequence: Synthetic primer
aggcttttggcaacagcactggtggctttgatgggcaagc

SEQ ID NO: 28472 - DNA, 40 bp, Artificial Sequence
  Description of Artificial Sequence: Synthetic primer
gctaagacagctgcaggaagaccgaaagaatgacaagaag

SEQ ID NO: 28473 - DNA, 40 bp, Artificial Sequence
  Description of Artificial Sequence: Synthetic primer
tggtgcagaatgtgtccatggccgtccaccacattggccg

SEQ ID NO: 28474 - DNA, 40 bp, Artificial Sequence
  Description of Artificial Sequence: Synthetic primer
accatttacaaatgttaattaaaatcttattttaaaatgg

SEQ ID NO: 28475 - DNA, 40 bp, Artificial Sequence
  Description of Artificial Sequence: Synthetic primer
ctcgtgcagcctccccaatgaaccactctgtccagatgaa

SEQ ID NO: 28476 - DNA, 40 bp, Artificial Sequence
  Description of Artificial Sequence: Synthetic primer
ttctaagacaagcaacactatccgtgttttcttgccgaac

SEQ ID NO: 28477 - DNA, 40 bp, Artificial Sequence
  Description of Artificial Sequence: Synthetic primer
tcaatattttcctgaacccaaatgaaatcttcatcatctg

SEQ ID NO: 28478 - DNA, 40 bp, Artificial Sequence
  Description of Artificial Sequence: Synthetic primer
gccattcaccttacgtgaagagtggtccagatgccagctc

SEQ ID NO: 28479 - DNA, 40 bp, Artificial Sequence
  Description of Artificial Sequence: Synthetic primer
cagccagaaccatcacctgcattggttccatccttgactg

SEQ ID NO: 28480 - DNA, 40 bp, Artificial Sequence
  Description of Artificial Sequence: Synthetic primer
tccctcttccccttcccaagagggtagaaatcattgaata

SEQ ID NO: 28481 - DNA, 40 bp, Artificial Sequence
  Description of Artificial Sequence: Synthetic primer
cacctcagtggtggaagacggccgcaagaagcttaacacg

SEQ ID NO: 28482 - DNA, 40 bp, Artificial Sequence
  Description of Artificial Sequence: Synthetic primer
acatgttctttcttcttgtagtctccgcaattgttcttcc

SEQ ID NO: 28483 - DNA, 40 bp, Artificial Sequence
  Description of Artificial Sequence: Synthetic primer
caaaaactggtctagtcaaaccaaatgggcacaaaagaac

SEQ ID NO: 28484 - DNA, 40 bp, Artificial Sequence
  Description of Artificial Sequence: Synthetic primer
gcgagccctgccaggccggtcgggcctcggcccggtcccc

SEQ ID NO: 28485 - DNA, 40 bp, Artificial Sequence
  Description of Artificial Sequence: Synthetic primer
gagggccatggctgtgacccataccctccctccccccagc

SEQ ID NO: 28486 - DNA, 40 bp, Artificial Sequence
  Description of Artificial Sequence: Synthetic primer
tttagtgaacaaacaatatgtggtcaattaaattgacttg

SEQ ID NO: 28487 - DNA, 40 bp, Artificial Sequence
  Description of Artificial Sequence: Synthetic primer
cttcagctcattagaaagcaggcggtttcgctcaagttgg

SEQ ID NO: 28488 - DNA, 40 bp, Artificial Sequence
  Description of Artificial Sequence: Synthetic primer
aatttatatttttaaagatttacattattttgagtaagtt

SEQ ID NO: 28489 - DNA, 40 bp, Artificial Sequence
  Description of Artificial Sequence: Synthetic primer
gacagagaaggggaagccctgttctgacaacagacatttc

SEQ ID NO: 28490 - DNA, 40 bp, Artificial Sequence
  Description of Artificial Sequence: Synthetic primer
ctagaaaaggcagagatggaacgatctacctatgttacag

SEQ ID NO: 28491 - DNA, 40 bp, Artificial Sequence
  Description of Artificial Sequence: Synthetic primer
aagataatggaccacatcgctcaaaagaatgggaagttgc

SEQ ID NO: 28492 - DNA, 40 bp, Artificial Sequence
  Description of Artificial Sequence: Synthetic primer
agccaggcttggcacagcatgactgtctggtataagatgc

SEQ ID NO: 28493 - DNA, 40 bp, Artificial Sequence
  Description of Artificial Sequence: Synthetic primer
atataaggctccatgaggtaggaggagcagcctcggcaag

SEQ ID NO: 28494 - DNA, 40 bp, Artificial Sequence
  Description of Artificial Sequence: Synthetic primer
aaagtaatatgactgtttaggtttgccaccaataataccc

SEQ ID NO: 28495 - DNA, 40 bp, Artificial Sequence
  Description of Artificial Sequence: Synthetic primer
tcagatgaaacaggtgaacacttctgtgacctgctacatc

SEQ ID NO: 28496 - DNA, 40 bp, Artificial Sequence
  Description of Artificial Sequence: Synthetic primer
acagcgggctggacttccgtagaaaattgccgaaccttac

SEQ ID NO: 28497 - DNA, 40 bp, Artificial Sequence
  Description of Artificial Sequence: Synthetic primer
aatcattagatctcagtctcacacctccaactgccccttc

SEQ ID NO: 28498 - DNA, 40 bp, Artificial Sequence
  Description of Artificial Sequence: Synthetic primer
tggacagcattgccctattactgggggaaaggaaggcatc

SEQ ID NO: 28499 - DNA, 40 bp, Artificial Sequence
  Description of Artificial Sequence: Synthetic primer
agtctcatctggaaagattatataaattgcattctccttg

SEQ ID NO: 28500 - DNA, 40 bp, Artificial Sequence
  Description of Artificial Sequence: Synthetic primer
gtttctcgggcttccctctgaagcttaatttcacgaaaac

SEQ ID NO: 28501 - DNA, 40 bp, Artificial Sequence
  Description of Artificial Sequence: Synthetic primer
cctggagcatgtgcaggatcctcagaacactgttaaggtc

SEQ ID NO: 28502 - DNA, 40 bp, Artificial Sequence
  Description of Artificial Sequence: Synthetic primer
tttttcttcctaagatttgcagaacagatgcctctgagac

SEQ ID NO: 28503 - DNA, 40 bp, Artificial Sequence
  Description of Artificial Sequence: Synthetic primer
ataagaacctggttcctaagcctgtaccacctccttccaa

SEQ ID NO: 28504 - DNA, 40 bp, Artificial Sequence
  Description of Artificial Sequence: Synthetic primer
ggctcttccggaagcaggagagctggggctcctcgggggg

SEQ ID NO: 28505 - DNA, 40 bp, Artificial Sequence
  Description of Artificial Sequence: Synthetic primer
agacgccgccctggaggcttctgagccggggcagcctggt

SEQ ID NO: 28506 - DNA, 40 bp, Artificial Sequence
  Description of Artificial Sequence: Synthetic primer
tagcaccatcaggggtgagaaaccgttcaggtaggaactc

SEQ ID NO: 28507 - DNA, 40 bp, Artificial Sequence
  Description of Artificial Sequence: Synthetic primer
ttacacattaatgttactagcatcaggagcttactgtttt

SEQ ID NO: 28508 - DNA, 40 bp, Artificial Sequence
  Description of Artificial Sequence: Synthetic primer
ccgtctccggaccctgctctgcaaggtccttggagtgctg

SEQ ID NO: 28509 - DNA, 40 bp, Artificial Sequence
  Description of Artificial Sequence: Synthetic primer
tggaccttaaggtaaatcgtgttttctttgggctttgctt

SEQ ID NO: 28510 - DNA, 40 bp, Artificial Sequence
  Description of Artificial Sequence: Synthetic primer
tgtcctgcagagacagtaattgctgtccttttccgccaac

SEQ ID NO: 28511 - DNA, 40 bp, Artificial Sequence
  Description of Artificial Sequence: Synthetic primer
cgagctgccactgcccccgggctgggagatgaccttcacg

SEQ ID NO: 28512 - DNA, 40 bp, Artificial Sequence
  Description of Artificial Sequence: Synthetic primer
aaacccacagtgatgcttagggaaagaccctgctcaggac

SEQ ID NO: 28513 - DNA, 40 bp, Artificial Sequence
  Description of Artificial Sequence: Synthetic primer
tgggggtgctgctgtgtcgtcgactgctgggaggggtatg

SEQ ID NO: 28514 - DNA, 40 bp, Artificial Sequence
  Description of Artificial Sequence: Synthetic primer
tctctatcccagcatgggggtggcaccgacaactacacag

SEQ ID NO: 28515 - DNA, 40 bp, Artificial Sequence
  Description of Artificial Sequence: Synthetic primer
gatacaagagtcagcatcattaaaggaaacgtggcaggac

SEQ ID NO: 28516 - DNA, 40 bp, Artificial Sequence
  Description of Artificial Sequence: Synthetic primer
tgtgttgaagaagtcatttgtcaaccatggtaaaacttgc

SEQ ID NO: 28517 - DNA, 40 bp, Artificial Sequence
  Description of Artificial Sequence: Synthetic primer
ctgtagccgttcatgtgagtagttgggggtaggcctggtg

SEQ ID NO: 28518 - DNA, 40 bp, Artificial Sequence
  Description of Artificial Sequence: Synthetic primer
atgccacacagcccaggcgcttgtggggattcttcgtcat

SEQ ID NO: 28519 - DNA, 40 bp, Artificial Sequence
  Description of Artificial Sequence: Synthetic primer
ctcgcccccccactcgcccgtgccaccgcgcaagcgccgg

SEQ ID NO: 28520 - DNA, 40 bp, Artificial Sequence
  Description of Artificial Sequence: Synthetic primer
agaggtgatgtgggaatagcacacattggagaaggtgagg

SEQ ID NO: 28521 - DNA, 40 bp, Artificial Sequence
  Description of Artificial Sequence: Synthetic primer
aatctcttcgttgcactttatgattttgtagcaagtggtg

SEQ ID NO: 28522 - DNA, 40 bp, Artificial Sequence
  Description of Artificial Sequence: Synthetic primer
atggtcgtttcaaacatacgtaaatatccatcatctgtgc

SEQ ID NO: 28523 - DNA, 40 bp, Artificial Sequence
  Description of Artificial Sequence: Synthetic primer
gccaaaaatagttaaagtgccttggtcctccctctgtagg

SEQ ID NO: 28524 - DNA, 40 bp, Artificial Sequence
  Description of Artificial Sequence: Synthetic primer
cggacggcaggaaacgcgggaggcgaaggcgaggctgctc

SEQ ID NO: 28525 - DNA, 40 bp, Artificial Sequence
  Description of Artificial Sequence: Synthetic primer
gcacataccaagtggtataatagtttccatcttctaatga

SEQ ID NO: 28526 - DNA, 40 bp, Artificial Sequence
  Description of Artificial Sequence: Synthetic primer
gcaacattctgaaacagtagttacagctgaggacagctac

SEQ ID NO: 28527 - DNA, 40 bp, Artificial Sequence
  Description of Artificial Sequence: Synthetic primer
ggccttgcggattacagccggagccttatcttggctggtc

SEQ ID NO: 28528 - DNA, 40 bp, Artificial Sequence
  Description of Artificial Sequence: Synthetic primer
gaccttcacatgagggaggcaaaaaagatgaagcagaaag

SEQ ID NO: 28529 - DNA, 40 bp, Artificial Sequence
  Description of Artificial Sequence: Synthetic primer
ttttgcaaatatgcattgatcgggagaaaggagaggaagg

SEQ ID NO: 28530 - DNA, 40 bp, Artificial Sequence
  Description of Artificial Sequence: Synthetic primer
tacaactgtggttcatgaagcgagaataatttccttttgg

SEQ ID NO: 28531 - DNA, 40 bp, Artificial Sequence
  Description of Artificial Sequence: Synthetic primer
tcacttctgctactaccactaccaataaagaggctgatcc

SEQ ID NO: 28532 - DNA, 40 bp, Artificial Sequence
  Description of Artificial Sequence: Synthetic primer
aagcctgtagctttctgaagtatgtggagtctaactgtcg

SEQ ID NO: 28533 - DNA, 40 bp, Artificial Sequence
  Description of Artificial Sequence: Synthetic primer
tgagcatgttgcacagcctccttggcagccttgactaacg

SEQ ID NO: 28534 - DNA, 40 bp, Artificial Sequence
  Description of Artificial Sequence: Synthetic primer
aggaaacaaatgaccccaacctgcccccggccgtgagcag

SEQ ID NO: 28535 - DNA, 40 bp, Artificial Sequence
  Description of Artificial Sequence: Synthetic primer
catcaatgctcagagttagcataatttggagctattcagg

SEQ ID NO: 28536 - DNA, 40 bp, Artificial Sequence
  Description of Artificial Sequence: Synthetic primer
taagctgacgtttgttgttagcagctgttgctctaccttg

SEQ ID NO: 28537 - DNA, 40 bp, Artificial Sequence
  Description of Artificial Sequence: Synthetic primer
tggactcgcctccgcccaccagcttgctgcatttgctaac

SEQ ID NO: 28538 - DNA, 40 bp, Artificial Sequence
  Description of Artificial Sequence: Synthetic primer
cgctggggtggctggcatcgccgcgaaccggggttccagg

SEQ ID NO: 28539 - DNA, 40 bp, Artificial Sequence
  Description of Artificial Sequence: Synthetic primer
caaatgaggtgaagggagccagaggggacttggcaataag

SEQ ID NO: 28540 - DNA, 40 bp, Artificial Sequence
  Description of Artificial Sequence: Synthetic primer
actctaacaggactaactggaaaaatactttgaccatagc

SEQ ID NO: 28541 - DNA, 40 bp, Artificial Sequence
  Description of Artificial Sequence: Synthetic primer
ttaagatcacatctgtcatagataagcttcaatctgattg

SEQ ID NO: 28542 - DNA, 40 bp, Artificial Sequence
  Description of Artificial Sequence: Synthetic primer
ggaaatgtggaacctccaccccagcacgctcacccttacc

SEQ ID NO: 28543 - DNA, 40 bp, Artificial Sequence
  Description of Artificial Sequence: Synthetic primer
agcagaagaaggctcctgccaagaaggccaacagcacgac

SEQ ID NO: 28544 - DNA, 40 bp, Artificial Sequence
  Description of Artificial Sequence: Synthetic primer
ttataaaagacaaatgattgcagaattaagcttaaaaaaa

SEQ ID NO: 28545 - DNA, 40 bp, Artificial Sequence
  Description of Artificial Sequence: Synthetic primer
gagcgcggggagcgggagggaggagggggcccgccaagac

SEQ ID NO: 28546 - DNA, 40 bp, Artificial Sequence
  Description of Artificial Sequence: Synthetic primer
tcacttgatttcttttgaagctccatggtaagtattttca

SEQ ID NO: 28547 - DNA, 40 bp, Artificial Sequence
  Description of Artificial Sequence: Synthetic primer
taaattaagttgtcttccaaaactgtgtacttgtctggtc

SEQ ID NO: 28548 - DNA, 40 bp, Artificial Sequence
  Description of Artificial Sequence: Synthetic primer
agctgcatctccactctgctggttctcggctccagattcc

SEQ ID NO: 28549 - DNA, 40 bp, Artificial Sequence
  Description of Artificial Sequence: Synthetic primer
ttctactgcacttttaggagattagatcctgaggaaaacc

SEQ ID NO: 28550 - DNA, 40 bp, Artificial Sequence
  Description of Artificial Sequence: Synthetic primer
gaacgtaggtgtgacacttttttgttcggaggtagttttg

SEQ ID NO: 28551 - DNA, 40 bp, Artificial Sequence
  Description of Artificial Sequence: Synthetic primer
cctgtgtcctcagcctcgtcctccccgtcttcgtcatctc

SEQ ID NO: 28552 - DNA, 40 bp, Artificial Sequence
  Description of Artificial Sequence: Synthetic primer
attggtgaagagatagaagaagacctttctgtggaaatag

SEQ ID NO: 28553 - DNA, 40 bp, Artificial Sequence
  Description of Artificial Sequence: Synthetic primer
ctggctgatgactgaaattccacaactagagagtcattcc

SEQ ID NO: 28554 - DNA, 40 bp, Artificial Sequence
  Description of Artificial Sequence: Synthetic primer
taagatctgatatttctgatcaagaggaagatgaagaaag

SEQ ID NO: 28555 - DNA, 40 bp, Artificial Sequence
  Description of Artificial Sequence: Synthetic primer
cacttaaaaatgagcacaggtttgctctatgcaagaattt

SEQ ID NO: 28556 - DNA, 40 bp, Artificial Sequence
  Description of Artificial Sequence: Synthetic primer
acaactttaatttacttctattttggtcaagttctaagag

SEQ ID NO: 28557 - DNA, 40 bp, Artificial Sequence
  Description of Artificial Sequence: Synthetic primer
atgaaaaaacacaggcgcctctggattgtgataacagtgc

SEQ ID NO: 28558 - DNA, 40 bp, Artificial Sequence
  Description of Artificial Sequence: Synthetic primer
tcatgtgttacgctatcaggacactccaggagtcaaaatg

SEQ ID NO: 28559 - DNA, 40 bp, Artificial Sequence
  Description of Artificial Sequence: Synthetic primer
atgccaggaaagtgccaagcaggcacccacgaaagctgag

SEQ ID NO: 28560 - DNA, 40 bp, Artificial Sequence
  Description of Artificial Sequence: Synthetic primer
atgcttctctgtttcacgtagttgggttgacaagtttctg

SEQ ID NO: 28561 - DNA, 40 bp, Artificial Sequence
  Description of Artificial Sequence: Synthetic primer
tttcttttttctctcgttcccaaggatccgatcaatgtgc

SEQ ID NO: 28562 - DNA, 40 bp, Artificial Sequence
  Description of Artificial Sequence: Synthetic primer
tttctgggctctcttggggttcatctccagggtggcaaac

SEQ ID NO: 28563 - DNA, 40 bp, Artificial Sequence
  Description of Artificial Sequence: Synthetic primer
cttgtgaaccccctcgcccggggagatagcccagaaaacc

SEQ ID NO: 28564 - DNA, 40 bp, Artificial Sequence
  Description of Artificial Sequence: Synthetic primer
tgccggccagctcaccagtcatggagcaggtcctcctctc

SEQ ID NO: 28565 - DNA, 40 bp, Artificial Sequence
  Description of Artificial Sequence: Synthetic primer
caatgttaaatcataacagcacaaaagaaaaaccagtatc

SEQ ID NO: 28566 - DNA, 40 bp, Artificial Sequence
  Description of Artificial Sequence: Synthetic primer
agtagtaattgcgcagccgcagttccactgctgcgaatcc

SEQ ID NO: 28567 - DNA, 40 bp, Artificial Sequence
  Description of Artificial Sequence: Synthetic primer
atcagcagcccccaaacttgatttcagaatcagctcttcc

SEQ ID NO: 28568 - DNA, 40 bp, Artificial Sequence
  Description of Artificial Sequence: Synthetic primer
ctgctggtcgtggcagacctgccctgagggcagggccatg

SEQ ID NO: 28569 - DNA, 40 bp, Artificial Sequence
  Description of Artificial Sequence: Synthetic primer
taacagccttcacggggccacggtggaaccaagacagcag

SEQ ID NO: 28570 - DNA, 40 bp, Artificial Sequence
  Description of Artificial Sequence: Synthetic primer
gaacatacaccgtgtctgttttcaccaaggctgttgtaag

SEQ ID NO: 28571 - DNA, 40 bp, Artificial Sequence
  Description of Artificial Sequence: Synthetic primer
tccggcgggtcttctccagctcctgtcgctgcttctcctc

SEQ ID NO: 28572 - DNA, 40 bp, Artificial Sequence
  Description of Artificial Sequence: Synthetic primer
tgtttctcttgatgtttacatgcacaagctttgcgttctg

SEQ ID NO: 28573 - DNA, 40 bp, Artificial Sequence
  Description of Artificial Sequence: Synthetic primer
ccctcatatattgcgctcccatcaccgaacgtctccttag

SEQ ID NO: 28574 - DNA, 40 bp, Artificial Sequence
  Description of Artificial Sequence: Synthetic primer
atttttcacataatacttgcatgaaacttcttccactagg

SEQ ID NO: 28575 - DNA, 40 bp, Artificial Sequence
  Description of Artificial Sequence: Synthetic primer
ggtctctgtacatgtgatgcactcctcaaagtggctgttc

SEQ ID NO: 28576 - DNA, 40 bp, Artificial Sequence
  Description of Artificial Sequence: Synthetic primer
agagagtgaaagtagttccagtgacagtgaggcaaatgag

SEQ ID NO: 28577 - DNA, 40 bp, Artificial Sequence
  Description of Artificial Sequence: Synthetic primer
cctcctctgccagcaggaataaagacttgtgcatccctca

SEQ ID NO: 28578 - DNA, 40 bp, Artificial Sequence
  Description of Artificial Sequence: Synthetic primer
tagtgcaaaataccatattaaagaggggaatgtggaggac

SEQ ID NO: 28579 - DNA, 40 bp, Artificial Sequence
  Description of Artificial Sequence: Synthetic primer
gaaggtgcaccaatattgtttgtaacctttcagagtcagc

SEQ ID NO: 28580 - DNA, 40 bp, Artificial Sequence
  Description of Artificial Sequence: Synthetic primer
ggctaagtttatcatagttcatagctggcctgtttttctg

SEQ ID NO: 28581 - DNA, 40 bp, Artificial Sequence
  Description of Artificial Sequence: Synthetic primer
tgacagtggaaagcactatgaatgtgaaaactgtgccaag

SEQ ID NO: 28582 - DNA, 40 bp, Artificial Sequence
  Description of Artificial Sequence: Synthetic primer
gacacatgatggttgcctcacaaccctgaccctcaatagc

SEQ ID NO: 28583 - DNA, 40 bp, Artificial Sequence
  Description of Artificial Sequence: Synthetic primer
aaatgcccgtctcttcatatttgagactttctgtcgcatc

SEQ ID NO: 28584 - DNA, 40 bp, Artificial Sequence
  Description of Artificial Sequence: Synthetic primer
cgaagatattactcaggatcttcgaaatcatcttgttcac

SEQ ID NO: 28585 - DNA, 40 bp, Artificial Sequence
  Description of Artificial Sequence: Synthetic primer
gtatttacagccattgttacaagtttataatgtatttttc

SEQ ID NO: 28586 - DNA, 40 bp, Artificial Sequence
  Description of Artificial Sequence: Synthetic primer
gtgctgctcaatggggattcggggccatcagaagcgatgc

SEQ ID NO: 28587 - DNA, 40 bp, Artificial Sequence
  Description of Artificial Sequence: Synthetic primer
atgttagaggaggcgcgacgacgggaggacaatctcaacg

SEQ ID NO: 28588 - DNA, 40 bp, Artificial Sequence
  Description of Artificial Sequence: Synthetic primer
agaaagcatcgtcctaggaatggatttctcctctaatgac

SEQ ID NO: 28589 - DNA, 40 bp, Artificial Sequence
  Description of Artificial Sequence: Synthetic primer
actcacggccctttttcctggccatctgcagaaatttaac

SEQ ID NO: 28590 - DNA, 40 bp, Artificial Sequence
  Description of Artificial Sequence: Synthetic primer
gaagagctgacggagaccactgtgcttcggtgacagattc

SEQ ID NO: 28591 - DNA, 40 bp, Artificial Sequence
  Description of Artificial Sequence: Synthetic primer
acaaggcagagatcccagagcggcggaaggacagcacgag

SEQ ID NO: 28592 - DNA, 40 bp, Artificial Sequence
  Description of Artificial Sequence: Synthetic primer
gagctggatcagatctgaatccagaggctctcggaggaag

SEQ ID NO: 28593 - DNA, 40 bp, Artificial Sequence
  Description of Artificial Sequence: Synthetic primer
cagtttcaagccttgcttcagtatgctgacccagtaaatg

SEQ ID NO: 28594 - DNA, 40 bp, Artificial Sequence
  Description of Artificial Sequence: Synthetic primer
gaacaatgattcatcaatgtgtgctccagctgtcctgcat

SEQ ID NO: 28595 - DNA, 40 bp, Artificial Sequence
  Description of Artificial Sequence: Synthetic primer
gacatggaaatcctccaggtactctgtgaacttgcaatag

SEQ ID NO: 28596 - DNA, 40 bp, Artificial Sequence
  Description of Artificial Sequence: Synthetic primer
catttgaagcatttcatctttcccaattttgttcagattc

SEQ ID NO: 28597 - DNA, 40 bp, Artificial Sequence
  Description of Artificial Sequence: Synthetic primer
cttgaaagaagctgccgaatgcaacggcaaagcacagcac

SEQ ID NO: 28598 - DNA, 40 bp, Artificial Sequence
  Description of Artificial Sequence: Synthetic primer
gctgttgaaattctgtaatgttgtgtccccatttcttttc

SEQ ID NO: 28599 - DNA, 40 bp, Artificial Sequence
  Description of Artificial Sequence: Synthetic primer
atttcgaagttcaaccgagtgacaatacacagcatcaatc

SEQ ID NO: 28600 - DNA, 40 bp, Artificial Sequence
  Description of Artificial Sequence: Synthetic primer
cttgaagacgatgttgccgagctgaagaacccctgagatg

SEQ ID NO: 28601 - DNA, 40 bp, Artificial Sequence
  Description of Artificial Sequence: Synthetic primer
tctttgtatgagaatggcatcaatggtatccttgcagatg

SEQ ID NO: 28602 - DNA, 40 bp, Artificial Sequence
  Description of Artificial Sequence: Synthetic primer
tgtgcggggtggagatgaagtttatctgctttgtgacaag

SEQ ID NO: 28603 - DNA, 40 bp, Artificial Sequence
  Description of Artificial Sequence: Synthetic primer
agcctccagtacggacgacgcctcactcgccgcggcgcag

SEQ ID NO: 28604 - DNA, 40 bp, Artificial Sequence
  Description of Artificial Sequence: Synthetic primer
cggcggcgggtcgtgggggctgactgtcgctctgcctttg

SEQ ID NO: 28605 - DNA, 40 bp, Artificial Sequence
  Description of Artificial Sequence: Synthetic primer
cgggtgctcaggctgggggtcattcaccagtgctatgagg

SEQ ID NO: 28606 - DNA, 40 bp, Artificial Sequence
  Description of Artificial Sequence: Synthetic primer
cttgggtttctgtcagttcagatttcagatccaccaactg

SEQ ID NO: 28607 - DNA, 40 bp, Artificial Sequence
  Description of Artificial Sequence: Synthetic primer
tgaggtgcacgtgtgttgggaatggtcgtggggaatggac

SEQ ID NO: 28608 - DNA, 40 bp, Artificial Sequence
  Description of Artificial Sequence: Synthetic primer
ctgagaagcgaggctgtcagaatgggacgggttgtacacg

SEQ ID NO: 28609 - DNA, 40 bp, Artificial Sequence
  Description of Artificial Sequence: Synthetic primer
gcgtcagtgtcctccgaaagaggtacagtgagccggtgag

SEQ ID NO: 28610 - DNA, 40 bp, Artificial Sequence
  Description of Artificial Sequence: Synthetic primer
ttagcttcaatacatccaaaccaaatggctgttaggtaga

SEQ ID NO: 28611 - DNA, 40 bp, Artificial Sequence
  Description of Artificial Sequence: Synthetic primer
agcactgaaaataaacattgctctttcaaaacaccgatcc

SEQ ID NO: 28612 - DNA, 40 bp, Artificial Sequence
  Description of Artificial Sequence: Synthetic primer
tttacgccaagctgattttgaggcccataacattctcagg

SEQ ID NO: 28613 - DNA, 40 bp, Artificial Sequence
  Description of Artificial Sequence: Synthetic primer
tctgaggtgacttgatgctgcagttggcagcaggctggac

SEQ ID NO: 28614 - DNA, 40 bp, Artificial Sequence
  Description of Artificial Sequence: Synthetic primer
ccagttttccgtctgggaacagtacctctgcccctgattc

SEQ ID NO: 28615 - DNA, 40 bp, Artificial Sequence
  Description of Artificial Sequence: Synthetic primer
tagttctctttgaggattcatgtcattgagggcctttgtg

SEQ ID NO: 28616 - DNA, 40 bp, Artificial Sequence
  Description of Artificial Sequence: Synthetic primer
atccagatggagagagaaaggattcgaatgcgccaagagg

SEQ ID NO: 28617 - DNA, 40 bp, Artificial Sequence
  Description of Artificial Sequence: Synthetic primer
cccggactttgtcaatgcggccttcggcaaggacgtgcgc

SEQ ID NO: 28618 - DNA, 40 bp, Artificial Sequence
  Description of Artificial Sequence: Synthetic primer
ctgaaactttctggaaatggagcaaatggagcaataaaaa

SEQ ID NO: 28619 - DNA, 40 bp, Artificial Sequence
  Description of Artificial Sequence: Synthetic primer
tctgctctttcagctccgcattctcaaggcaaaggctcag

SEQ ID NO: 28620 - DNA, 40 bp, Artificial Sequence
  Description of Artificial Sequence: Synthetic primer
ttccaaagaatttccctgctggccgtttgtaggggttgtg

SEQ ID NO: 28621 - DNA, 40 bp, Artificial Sequence
  Description of Artificial Sequence: Synthetic primer
actaacttggcatcaccaagaaccactaccttgggcacag

SEQ ID NO: 28622 - DNA, 40 bp, Artificial Sequence
  Description of Artificial Sequence: Synthetic primer
ggaccttttaccatgaatagttctactccttctacaggtg

SEQ ID NO: 28623 - DNA, 40 bp, Artificial Sequence
  Description of Artificial Sequence: Synthetic primer
tgctccgacagcttcttcttcagcctctccgtagccttgc

SEQ ID NO: 28624 - DNA, 40 bp, Artificial Sequence
  Description of Artificial Sequence: Synthetic primer
gtaaaaaagcaggccatgtcctctctgatgctgaatcagg

SEQ ID NO: 28625 - DNA, 40 bp, Artificial Sequence
  Description of Artificial Sequence: Synthetic primer
gcattactatgggaggagcaactaaaaaataaagacttac

SEQ ID NO: 28626 - DNA, 40 bp, Artificial Sequence
  Description of Artificial Sequence: Synthetic primer
aaaggtggctctgtactggggatattggagagtttgaacc

SEQ ID NO: 28627 - DNA, 40 bp, Artificial Sequence
  Description of Artificial Sequence: Synthetic primer
gacccagtccttcgaccctgacgaccctggggcgactctc

SEQ ID NO: 28628 - DNA, 40 bp, Artificial Sequence
  Description of Artificial Sequence: Synthetic primer
tccagctcagactggagttcatctacttggtcttgtagta

SEQ ID NO: 28629 - DNA, 40 bp, Artificial Sequence
  Description of Artificial Sequence: Synthetic primer
ttgcactgaaatggaattcccatgcccctaccccttaccc

SEQ ID NO: 28630 - DNA, 40 bp, Artificial Sequence
  Description of Artificial Sequence: Synthetic primer
cttctcaaatgacagataatttctgttgttcttttttata

SEQ ID NO: 28631 - DNA, 40 bp, Artificial Sequence
  Description of Artificial Sequence: Synthetic primer
ttgacaaccaccagaaaaaatcatttaatgaaataaaggg

SEQ ID NO: 28632 - DNA, 40 bp, Artificial Sequence
  Description of Artificial Sequence: Synthetic primer
ttatagcttcggccacaatatccacatttgtgaggtttac

SEQ ID NO: 28633 - DNA, 40 bp, Artificial Sequence
  Description of Artificial Sequence: Synthetic primer
tcgctttgccagagaccatgaaggacgccgagaaccttgg

SEQ ID NO: 28634 - DNA, 40 bp, Artificial Sequence
  Description of Artificial Sequence: Synthetic primer
tggtctggtggcctcctcttcaactgaaagactaaaatcc

SEQ ID NO: 28635 - DNA, 40 bp, Artificial Sequence
  Description of Artificial Sequence: Synthetic primer
ctttgatttcttcccgtgtgtagcccatacccaccatcac

SEQ ID NO: 28636 - DNA, 40 bp, Artificial Sequence
  Description of Artificial Sequence: Synthetic primer
aggatagtgtcagcccctttgcagtagagtcggatcttcc

SEQ ID NO: 28637 - DNA, 40 bp, Artificial Sequence
  Description of Artificial Sequence: Synthetic primer
aacgagttttttacccatgcggctcagagctggcgggagc

SEQ ID NO: 28638 - DNA, 40 bp, Artificial Sequence
  Description of Artificial Sequence: Synthetic primer
aatcagaattggcataatttgtcttagttgatattcaagg

SEQ ID NO: 28639 - DNA, 40 bp, Artificial Sequence
  Description of Artificial Sequence: Synthetic primer
gcagaagacgctgctgcagatggaggagatggaatctcag

SEQ ID NO: 28640 - DNA, 40 bp, Artificial Sequence
  Description of Artificial Sequence: Synthetic primer
ttatagtgttgataagtccacccccttaatcagcacatac

SEQ ID NO: 28641 - DNA, 40 bp, Artificial Sequence
  Description of Artificial Sequence: Synthetic primer
gtggctgctcttgctggacacgcgccgccccaggccatcg

SEQ ID NO: 28642 - DNA, 40 bp, Artificial Sequence
  Description of Artificial Sequence: Synthetic primer
acctgtacgccacctgggaggtggaccggagctcgtccag

SEQ ID NO: 28643 - DNA, 40 bp, Artificial Sequence
  Description of Artificial Sequence: Synthetic primer
agatccagggcgagaatgtgaccctgggtgacgacccttc

SEQ ID NO: 28644 - DNA, 40 bp, Artificial Sequence
  Description of Artificial Sequence: Synthetic primer
aaaggaaccaggctagctgaatgctttcccacaatcctta

SEQ ID NO: 28645 - DNA, 40 bp, Artificial Sequence
  Description of Artificial Sequence: Synthetic primer
gagttttgtaagaaaacctaccttatgaatgagtacagtg

SEQ ID NO: 28646 - DNA, 40 bp, Artificial Sequence
  Description of Artificial Sequence: Synthetic primer
agaactaatagagaaataacaataagctggctgttcattg

SEQ ID NO: 28647 - DNA, 40 bp, Artificial Sequence
  Description of Artificial Sequence: Synthetic primer
gatctgtgattccacaattggtcatagtgactccaacaag

SEQ ID NO: 28648 - DNA, 40 bp, Artificial Sequence
  Description of Artificial Sequence: Synthetic primer
tactgcaaaagcaaacagcacaacactcatcatactcatc

SEQ ID NO: 28649 - DNA, 40 bp, Artificial Sequence
  Description of Artificial Sequence: Synthetic primer
atttacacctgatctctccaaatcaagaacctcacagatg

SEQ ID NO: 28650 - DNA, 40 bp, Artificial Sequence
  Description of Artificial Sequence: Synthetic primer
acccctgggggcctgctgtggcccaggctgatcactggta

SEQ ID NO: 28651 - DNA, 40 bp, Artificial Sequence
  Description of Artificial Sequence: Synthetic primer
aatcatgatcataatgaagtcattcttaatttagtagata

SEQ ID NO: 28652 - DNA, 40 bp, Artificial Sequence
  Description of Artificial Sequence: Synthetic primer
tctttcaaaagcttcaaatacaacacaaaaattgtccatc

SEQ ID NO: 28653 - DNA, 40 bp, Artificial Sequence
  Description of Artificial Sequence: Synthetic primer
ttttgggcaagccttttcttcctgatgcattgcgaatgtg

SEQ ID NO: 28654 - DNA, 40 bp, Artificial Sequence
  Description of Artificial Sequence: Synthetic primer
ggcttctaacctcttcaattcattttccttttctttcaac

SEQ ID NO: 28655 - DNA, 40 bp, Artificial Sequence
  Description of Artificial Sequence: Synthetic primer
ctttaattctcccttttcagacaatagtaccagcctccag

SEQ ID NO: 28656 - DNA, 40 bp, Artificial Sequence
  Description of Artificial Sequence: Synthetic primer
gactaaatcattatgaatttgagagaagtaagtcatcagg

SEQ ID NO: 28657 - DNA, 40 bp, Artificial Sequence
  Description of Artificial Sequence: Synthetic primer
gaatggtacacagctgcttcccatagcagcacaaagtctg

SEQ ID NO: 28658 - DNA, 40 bp, Artificial Sequence
  Description of Artificial Sequence: Synthetic primer
catttggaacaggaacaggtctctttgggcagaccaatac

SEQ ID NO: 28659 - DNA, 40 bp, Artificial Sequence
  Description of Artificial Sequence: Synthetic primer
ggggggttccatctgatgtcatcacttggccacgaataac

SEQ ID NO: 28660 - DNA, 40 bp, Artificial Sequence
  Description of Artificial Sequence: Synthetic primer
attctctgttaaattgttaatatggaaaatatttaaaatc

SEQ ID NO: 28661 - DNA, 40 bp, Artificial Sequence
  Description of Artificial Sequence: Synthetic primer
acttttttccagggaggggtgggagagggaatttaaaagg

SEQ ID NO: 28662 - DNA, 40 bp, Artificial Sequence
  Description of Artificial Sequence: Synthetic primer
ttgttacttttgttggaatctgatcccaaggtttattctc

SEQ ID NO: 28663 - DNA, 40 bp, Artificial Sequence
  Description of Artificial Sequence: Synthetic primer
tcagacttaggtgcagggtcaggggctggcaatggggaag

SEQ ID NO: 28664 - DNA, 40 bp, Artificial Sequence
  Description of Artificial Sequence: Synthetic primer
ggaagagcatgtgagcaaggaggctgaggtcctgataagc

SEQ ID NO: 28665 - DNA, 40 bp, Artificial Sequence
  Description of Artificial Sequence: Synthetic primer
tttgctacctttgaggccagtcagcagccgctcatgatac

SEQ ID NO: 28666 - DNA, 40 bp, Artificial Sequence
  Description of Artificial Sequence: Synthetic primer
gaaaatacgctcattatttggacatggctagtgaggaagg

SEQ ID NO: 28667 - DNA, 40 bp, Artificial Sequence
  Description of Artificial Sequence: Synthetic primer
actggacgttgatgccactgaatgcctggcagttttccac

SEQ ID NO: 28668 - DNA, 40 bp, Artificial Sequence
  Description of Artificial Sequence: Synthetic primer
tctttttcagaggcaatgatggcttcaatgttggcaccac

SEQ ID NO: 28669 - DNA, 40 bp, Artificial Sequence
  Description of Artificial Sequence: Synthetic primer
ccacagcgtgctgccgctcgaggaggcggtggagggcttc

SEQ ID NO: 28670 - DNA, 40 bp, Artificial Sequence
  Description of Artificial Sequence: Synthetic primer
tgccaagactatcctctccctcatgacccgagagaagcac

SEQ ID NO: 28671 - DNA, 40 bp, Artificial Sequence
  Description of Artificial Sequence: Synthetic primer
gagggagtctcatttcggttgccacagcttttcttgtcac

SEQ ID NO: 28672 - DNA, 40 bp, Artificial Sequence
  Description of Artificial Sequence: Synthetic primer
aataaacttgcaaagaaatattgcaggtaaagtagtcacc

SEQ ID NO: 28673 - DNA, 40 bp, Artificial Sequence
  Description of Artificial Sequence: Synthetic primer
cagctgctattaatctaagtctattgtttttctattttag

SEQ ID NO: 28674 - DNA, 40 bp, Artificial Sequence
  Description of Artificial Sequence: Synthetic primer
ttcattgatagcctgagaaatgtacaatgaacatgtttag

SEQ ID NO: 28675 - DNA, 40 bp, Artificial Sequence
  Description of Artificial Sequence: Synthetic primer
gctgttgctgctgaagaaggagctgtcttgccacctgaag

SEQ ID NO: 28676 - DNA, 40 bp, Artificial Sequence
  Description of Artificial Sequence: Synthetic primer
tcccctcaccgcagccactggggtcaggaggagacacgac

SEQ ID NO: 28677 - DNA, 40 bp, Artificial Sequence
  Description of Artificial Sequence: Synthetic primer
tgttgtaatcccagcaagttgctaactgtgcgtttctccc

SEQ ID NO: 28678 - DNA, 40 bp, Artificial Sequence
  Description of Artificial Sequence: Synthetic primer
tccgggagggcaccgcgtctgttgcacctggggctggttt

SEQ ID NO: 28679 - DNA, 40 bp, Artificial Sequence
  Description of Artificial Sequence: Synthetic primer
gataggggttattgcatatcaatttggggctgtagagtgc

SEQ ID NO: 28680 - DNA, 40 bp, Artificial Sequence
  Description of Artificial Sequence: Synthetic primer
tgaggcctggaaggagggtcagttcaaggacatcattacc

SEQ ID NO: 28681 - DNA, 40 bp, Artificial Sequence
  Description of Artificial Sequence: Synthetic primer
ctggtgtcactcatctccatgatcatctcagccaacatgc

SEQ ID NO: 28682 - DNA, 40 bp, Artificial Sequence
  Description of Artificial Sequence: Synthetic primer
atcaggaagagaacagcggaacatgaggcagcacagcaag

SEQ ID NO: 28683 - DNA, 40 bp, Artificial Sequence
  Description of Artificial Sequence: Synthetic primer
cctcgtgggagctgcgctggccgctggcctactctggaag

SEQ ID NO: 28684 - DNA, 40 bp, Artificial Sequence
  Description of Artificial Sequence: Synthetic primer
cagaaggagaccacccctttctatccccggtcaccctatg

SEQ ID NO: 28685 - DNA, 40 bp, Artificial Sequence
  Description of Artificial Sequence: Synthetic primer
atactcgctaatggagaaattcactttagacctctagacc

SEQ ID NO: 28686 - DNA, 40 bp, Artificial Sequence
  Description of Artificial Sequence: Synthetic primer
gatcctcatcattggaggcagcatcgcaaacttcaccaac

SEQ ID NO: 28687 - DNA, 40 bp, Artificial Sequence
  Description of Artificial Sequence: Synthetic primer
gctcctcttctgccggggtgtgtgcaccccctccactttg

SEQ ID NO: 28688 - DNA, 40 bp, Artificial Sequence
  Description of Artificial Sequence: Synthetic primer
tgacaaacattactcatgtctgtacagttgggagaactag

SEQ ID NO: 28689 - DNA, 40 bp, Artificial Sequence
  Description of Artificial Sequence: Synthetic primer
agggtgagctggagagggcagaggagcgtgcggaggtgtc

SEQ ID NO: 28690 - DNA, 40 bp, Artificial Sequence
  Description of Artificial Sequence: Synthetic primer
tctactaggcctgcttcaaccagctgtagtttaatagcat

SEQ ID NO: 28691 - DNA, 40 bp, Artificial Sequence
  Description of Artificial Sequence: Synthetic primer
tccagcggatgtcacagctgcagttgaaaaagttctgctc

SEQ ID NO: 28692 - DNA, 40 bp, Artificial Sequence
  Description of Artificial Sequence: Synthetic primer
gactaaagctcaagatggaagccaccctttgtcacttcag

SEQ ID NO: 28693 - DNA, 40 bp, Artificial Sequence
  Description of Artificial Sequence: Synthetic primer
aaacattagtacagcataagagttcatgaagagcctctcg

SEQ ID NO: 28694 - DNA, 40 bp, Artificial Sequence
  Description of Artificial Sequence: Synthetic primer
ttgaattggcttttctggaggcagtacttgtctgagactg

SEQ ID NO: 28695 - DNA, 40 bp, Artificial Sequence
  Description of Artificial Sequence: Synthetic primer
agaatgaaacgtctggtctgtcctgttgcttctgaaactc

SEQ ID NO: 28696 - DNA, 40 bp, Artificial Sequence
  Description of Artificial Sequence: Synthetic primer
taagcgacaaaccctctccagtgaccagcccaagctcctc

SEQ ID NO: 28697 - DNA, 40 bp, Artificial Sequence
  Description of Artificial Sequence: Synthetic primer
ggtaagtgcgcaatgctaagctgtttgctcacgtgactgc

SEQ ID NO: 28698 - DNA, 40 bp, Artificial Sequence
  Description of Artificial Sequence: Synthetic primer
gaaaaccctgcgggggctgggccttgcaagacaggtggac

SEQ ID NO: 28699 - DNA, 40 bp, Artificial Sequence
  Description of Artificial Sequence: Synthetic primer
ttattgtaattgatcatagacaaactcagaacttcgatgc

SEQ ID NO: 28700 - DNA, 40 bp, Artificial Sequence
  Description of Artificial Sequence: Synthetic primer
gacacacacgacatctgcagggaacctgggggtggtgagg

SEQ ID NO: 28701 - DNA, 40 bp, Artificial Sequence
  Description of Artificial Sequence: Synthetic primer
gcctgggtatagctgacatcagtgggctgtccataggttc

SEQ ID NO: 28702 - DNA, 40 bp, Artificial Sequence
  Description of Artificial Sequence: Synthetic primer
taggcattctcacacactccaaatgcacagcactggtaag

SEQ ID NO: 28703 - DNA, 40 bp, Artificial Sequence
  Description of Artificial Sequence: Synthetic primer
tgctcattggaaaacttcaaaaggcagtgtctgaagaatg

SEQ ID NO: 28704 - DNA, 40 bp, Artificial Sequence
  Description of Artificial Sequence: Synthetic primer
ctcggtgggcgtcacggccgggctgcccacgcccgagctg

SEQ ID NO: 28705 - DNA, 40 bp, Artificial Sequence
  Description of Artificial Sequence: Synthetic primer
agtggcgccagcgcaaagagcaggctcggggccaggtcac

SEQ ID NO: 28706 - DNA, 40 bp, Artificial Sequence
  Description of Artificial Sequence: Synthetic primer
tccctaaacaccgaggcgtaaagtaccacgactacacacc

SEQ ID NO: 28707 - DNA, 40 bp, Artificial Sequence
  Description of Artificial Sequence: Synthetic primer
cgccgacgccaaaggggacagcgagtcggaggaggacgag

SEQ ID NO: 28708 - DNA, 40 bp, Artificial Sequence
  Description of Artificial Sequence: Synthetic primer
gcactgggaacagtcggggctgcccatggcacagttatag

SEQ ID NO: 28709 - DNA, 40 bp, Artificial Sequence
  Description of Artificial Sequence: Synthetic primer
gcgggctggtggggaggccaagctggggggtggtatgtgc

SEQ ID NO: 28710 - DNA, 40 bp, Artificial Sequence
  Description of Artificial Sequence: Synthetic primer
atgcatgttagattttagttttgcaagcatgttgtttttc

SEQ ID NO: 28711 - DNA, 40 bp, Artificial Sequence
  Description of Artificial Sequence: Synthetic primer
cttcccgaacctgctggagttatcgttccggagggtcttg

SEQ ID NO: 28712 - DNA, 40 bp, Artificial Sequence
  Description of Artificial Sequence: Synthetic primer
atggtaaactaaggctcagtacagttcagcagacttttgg

SEQ ID NO: 28713 - DNA, 40 bp, Artificial Sequence
  Description of Artificial Sequence: Synthetic primer
gcttcctgatggttctcctgtaccccagggcatggccctg

SEQ ID NO: 28714 - DNA, 40 bp, Artificial Sequence
  Description of Artificial Sequence: Synthetic primer
ggagagtgcattgtctctgatttcactattggtcggaaag

SEQ ID NO: 28715 - DNA, 40 bp, Artificial Sequence
  Description of Artificial Sequence: Synthetic primer
ggtgtgaattagggaccgggaggcgtcgaacggaggaacg

SEQ ID NO: 28716 - DNA, 40 bp, Artificial Sequence
  Description of Artificial Sequence: Synthetic primer
ccccgagaagactgatcagttcttcagttctaaaacaatg

SEQ ID NO: 28717 - DNA, 40 bp, Artificial Sequence
  Description of Artificial Sequence: Synthetic primer
ctatagaatcctgaggaattttcacaaatacttcttttgc

SEQ ID NO: 28718 - DNA, 40 bp, Artificial Sequence
  Description of Artificial Sequence: Synthetic primer
atgaccttttccccaatgatgaagacgacccagggcaagg

SEQ ID NO: 28719 - DNA, 40 bp, Artificial Sequence
  Description of Artificial Sequence: Synthetic primer
tatgatgaacagtccagtaaatcagcctgccatgggaatg

SEQ ID NO: 28720 - DNA, 40 bp, Artificial Sequence
  Description of Artificial Sequence: Synthetic primer
ttctcaaggcggattaattagcccaagaaacattatattc

SEQ ID NO: 28721 - DNA, 40 bp, Artificial Sequence
  Description of Artificial Sequence: Synthetic primer
ctatgagagatgagagttgggtcgtttgttctctttgttg

SEQ ID NO: 28722 - DNA, 40 bp, Artificial Sequence
  Description of Artificial Sequence: Synthetic primer
gatactctcactgtccaggcccagcgccttctcgctgtcc

SEQ ID NO: 28723 - DNA, 40 bp, Artificial Sequence
  Description of Artificial Sequence: Synthetic primer
tctttcacaagatctgtagtgtaagacctgtgactaatgc

SEQ ID NO: 28724 - DNA, 40 bp, Artificial Sequence
  Description of Artificial Sequence: Synthetic primer
tgccaaagatgaaattggagaattttctgataatattgag

SEQ ID NO: 28725 - DNA, 40 bp, Artificial Sequence
  Description of Artificial Sequence: Synthetic primer
tttaacaaaaaaatatattctttgtattgtttctttaaac

SEQ ID NO: 28726 - DNA, 40 bp, Artificial Sequence
  Description of Artificial Sequence: Synthetic primer
aacttctacgtcatcaatgggaagagaaaacgaagtcagc

SEQ ID NO: 28727 - DNA, 40 bp, Artificial Sequence
  Description of Artificial Sequence: Synthetic primer
cggactgatcttcattacacccctcagcagaaagatccag

SEQ ID NO: 28728 - DNA, 40 bp, Artificial Sequence
  Description of Artificial Sequence: Synthetic primer
cacgcccacgtcaacgtgagctggtgcttcgtgtgctcca

SEQ ID NO: 28729 - DNA, 40 bp, Artificial Sequence
  Description of Artificial Sequence: Synthetic primer
ctggcttgcacatgagaaaaggtgtaagcattgctgtgag

SEQ ID NO: 28730 - DNA, 40 bp, Artificial Sequence
  Description of Artificial Sequence: Synthetic primer
cagatgcctcctctccaaagagaattaaaatcgtagcttg

SEQ ID NO: 28731 - DNA, 40 bp, Artificial Sequence
  Description of Artificial Sequence: Synthetic primer
tttgttctcactcgacctggctaggactggctaggagctg

SEQ ID NO: 28732 - DNA, 40 bp, Artificial Sequence
  Description of Artificial Sequence: Synthetic primer
aaaactgtttagtaaaaaaggatagaatcaaaactcttcc

SEQ ID NO: 28733 - DNA, 40 bp, Artificial Sequence
  Description of Artificial Sequence: Synthetic primer
gccaaaccgagagcgtcaaaaattgatgagggaacaaaac

SEQ ID NO: 28734 - DNA, 40 bp, Artificial Sequence
  Description of Artificial Sequence: Synthetic primer
ccgccgggatatctgaggcagggctggaccaccccagagg

SEQ ID NO: 28735 - DNA, 40 bp, Artificial Sequence
  Description of Artificial Sequence: Synthetic primer
gtcatgcattcaagctgggatgtcatttggtataaattgt

SEQ ID NO: 28736 - DNA, 40 bp, Artificial Sequence
  Description of Artificial Sequence: Synthetic primer
tgtacagaagcaatccagtgtggtaataaaaagcaaggat

SEQ ID NO: 28737 - DNA, 40 bp, Artificial Sequence
  Description of Artificial Sequence: Synthetic primer
atttggctgtgttacattctagaaaactttgtgtctactc

SEQ ID NO: 28738 - DNA, 40 bp, Artificial Sequence
  Description of Artificial Sequence: Synthetic primer
cttcgactcccagctccgggccgggaaggcccatgcccgc

SEQ ID NO: 28739 - DNA, 40 bp, Artificial Sequence
  Description of Artificial Sequence: Synthetic primer
tttttacaacgaaacatcgccatgttcaaaatggactggc

SEQ ID NO: 28740 - DNA, 40 bp, Artificial Sequence
  Description of Artificial Sequence: Synthetic primer
gctcccccgcctgctctcggtggtggcgtctggcccttcc

SEQ ID NO: 28741 - DNA, 40 bp, Artificial Sequence
  Description of Artificial Sequence: Synthetic primer
ctgcctgggccgcaggaactgcgtggcctcgcgcgccggc

SEQ ID NO: 28742 - DNA, 40 bp, Artificial Sequence
  Description of Artificial Sequence: Synthetic primer
cgcggagtgcgccaggccgccgcaggccgacgggtggaag

SEQ ID NO: 28743 - DNA, 40 bp, Artificial Sequence
  Description of Artificial Sequence: Synthetic primer
agctagaacccacgtcgggtgagggtggttatggggtcac

SEQ ID NO: 28744 - DNA, 40 bp, Artificial Sequence
  Description of Artificial Sequence: Synthetic primer
catatgatgggtcagagacagattcctccctatagacctc

SEQ ID NO: 28745 - DNA, 40 bp, Artificial Sequence
  Description of Artificial Sequence: Synthetic primer
aaaaacttcttatcatctgtcgcatattttctcggtgtgc

SEQ ID NO: 28746 - DNA, 40 bp, Artificial Sequence
  Description of Artificial Sequence: Synthetic primer
gggagaagtggatcaagcaccaccccggggagcctctcac

SEQ ID NO: 28747 - DNA, 40 bp, Artificial Sequence
  Description of Artificial Sequence: Synthetic primer
tgtctttttattccctctgatgagacaacacagattccac

SEQ ID NO: 28748 - DNA, 40 bp, Artificial Sequence
  Description of Artificial Sequence: Synthetic primer
aggattcagtcatagcagataaaggatgttctctgaaaaa

SEQ ID NO: 28749 - DNA, 40 bp, Artificial Sequence
  Description of Artificial Sequence: Synthetic primer
actgtaaaggccagtgaatgctcccttgggaatgtatgtc

SEQ ID NO: 28750 - DNA, 40 bp, Artificial Sequence
  Description of Artificial Sequence: Synthetic primer
tagaggacacaatggctttcttcttgcttctaaaaattac

SEQ ID NO: 28751 - DNA, 40 bp, Artificial Sequence
  Description of Artificial Sequence: Synthetic primer
cggttaggagaatgtgccttttttgtacctttgcatttag

SEQ ID NO: 28752 - DNA, 40 bp, Artificial Sequence
  Description of Artificial Sequence: Synthetic primer
cgagtcaagttatcaaaccctcccagtgctggccccatcg

SEQ ID NO: 28753 - DNA, 40 bp, Artificial Sequence
  Description of Artificial Sequence: Synthetic primer
ccttcagcagcctcactgttaataaatgcttctaagtctc

SEQ ID NO: 28754 - DNA, 40 bp, Artificial Sequence
  Description of Artificial Sequence: Synthetic primer
cgtcctgggactagggggaagttcgcgactttctgaagac

SEQ ID NO: 28755 - DNA, 40 bp, Artificial Sequence
  Description of Artificial Sequence: Synthetic primer
ttccccagccagcagactacaatgtatcaacagcaacagc

SEQ ID NO: 28756 - DNA, 40 bp, Artificial Sequence
  Description of Artificial Sequence: Synthetic primer
gggccctgccactcccagagagaatggctgatgcaggttg

SEQ ID NO: 28757 - DNA, 40 bp, Artificial Sequence
  Description of Artificial Sequence: Synthetic primer
agatatattaaaattaagatgaaggggcctggtgcagtgg

SEQ ID NO: 28758 - DNA, 40 bp, Artificial Sequence
  Description of Artificial Sequence: Synthetic primer
gagggcgtctcgtgcgtacgcggcctgctccaggttcagc

SEQ ID NO: 28759 - DNA, 40 bp, Artificial Sequence
  Description of Artificial Sequence: Synthetic primer
tggagaaaacccctcccacggtgcccaaacaccagtcacc

SEQ ID NO: 28760 - DNA, 40 bp, Artificial Sequence
  Description of Artificial Sequence: Synthetic primer
agacaaaaaattataagaattaatacctgcaaagaggatt

SEQ ID NO: 28761 - DNA, 40 bp, Artificial Sequence
  Description of Artificial Sequence: Synthetic primer
aaacagtgaaagtatgtgcaactcttccttccacggtagc

SEQ ID NO: 28762 - DNA, 40 bp, Artificial Sequence
  Description of Artificial Sequence: Synthetic primer
ggcattactcagttctttttccagccctgcaactgtgtcc

SEQ ID NO: 28763 - DNA, 40 bp, Artificial Sequence
  Description of Artificial Sequence: Synthetic primer
tggtttggtagtcatataaggcaatgaccacagtttcttc

SEQ ID NO: 28764 - DNA, 40 bp, Artificial Sequence
  Description of Artificial Sequence: Synthetic primer
gaaattcacaaaatgagctgttcttggctacatacagaag

SEQ ID NO: 28765 - DNA, 40 bp, Artificial Sequence
  Description of Artificial Sequence: Synthetic primer
gctgagacctcactgtcacctggcttctcaggcaaagctg

SEQ ID NO: 28766 - DNA, 40 bp, Artificial Sequence
  Description of Artificial Sequence: Synthetic primer
tagatgggctcaatctcacctcttcccattccctgctatc

SEQ ID NO: 28767 - DNA, 40 bp, Artificial Sequence
  Description of Artificial Sequence: Synthetic primer
tggcttggtggttgcggtcatcttctccctgctgctcgtg

SEQ ID NO: 28768 - DNA, 40 bp, Artificial Sequence
  Description of Artificial Sequence: Synthetic primer
agctgctgcagcttctcgttgcagtaattgatgcagaact

SEQ ID NO: 28769 - DNA, 40 bp, Artificial Sequence
  Description of Artificial Sequence: Synthetic primer
gtttaccgacccaagatacagatttatagagaagattgtg

SEQ ID NO: 28770 - DNA, 40 bp, Artificial Sequence
  Description of Artificial Sequence: Synthetic primer
ctcctcactagcttatggagcccaggcagcttcatataat

SEQ ID NO: 28771 - DNA, 40 bp, Artificial Sequence
  Description of Artificial Sequence: Synthetic primer
ccagctgctggaagtcgaacatggcacgaaagagatcaag

SEQ ID NO: 28772 - DNA, 40 bp, Artificial Sequence
  Description of Artificial Sequence: Synthetic primer
ttgctccccgccggctcaggcgctcgggcgctggggcttt

SEQ ID NO: 28773 - DNA, 40 bp, Artificial Sequence
  Description of Artificial Sequence: Synthetic primer
acttgtttctgtcacattgttcaaaattcttttgggctta

SEQ ID NO: 28774 - DNA, 40 bp, Artificial Sequence
  Description of Artificial Sequence: Synthetic primer
caccggcctcctctaccttaaccggagcctggaccatagc

SEQ ID NO: 28775 - DNA, 40 bp, Artificial Sequence
  Description of Artificial Sequence: Synthetic primer
ttccacagacgtcactgataaaaccggtcgggaacatctc

SEQ ID NO: 28776 - DNA, 40 bp, Artificial Sequence
  Description of Artificial Sequence: Synthetic primer
gtcatgcgagtagcgacagttgtctccttccttacaaacc

SEQ ID NO: 28777 - DNA, 40 bp, Artificial Sequence
  Description of Artificial Sequence: Synthetic primer
aaaccttcaacatattcttccactgaaaaagccaaagttc

SEQ ID NO: 28778 - DNA, 40 bp, Artificial Sequence
  Description of Artificial Sequence: Synthetic primer
acttgctgtcggactggctgagaagcccggtcacgttgtc

SEQ ID NO: 28779 - DNA, 40 bp, Artificial Sequence
  Description of Artificial Sequence: Synthetic primer
tcaagaaaagaccatctccctggtattttagttgataaag

SEQ ID NO: 28780 - DNA, 40 bp, Artificial Sequence
  Description of Artificial Sequence: Synthetic primer
gtttttccacactctaaaaagtcaatcagtcttccaggtg

SEQ ID NO: 28781 - DNA, 40 bp, Artificial Sequence
  Description of Artificial Sequence: Synthetic primer
gatgcctcccctcaggggggaagcatcgagggccaggagg

SEQ ID NO: 28782 - DNA, 40 bp, Artificial Sequence
  Description of Artificial Sequence: Synthetic primer
aaacccccgtgccagcacaaagagagcgggcaccagtatc

SEQ ID NO: 28783 - DNA, 40 bp, Artificial Sequence
  Description of Artificial Sequence: Synthetic primer
gatccttaggtatcccataaagctacccacaattatttta

SEQ ID NO: 28784 - DNA, 40 bp, Artificial Sequence
  Description of Artificial Sequence: Synthetic primer
tcgcagagctggactggggcaggctgggcttccaggaaat

SEQ ID NO: 28785 - DNA, 40 bp, Artificial Sequence
  Description of Artificial Sequence: Synthetic primer
agattcctcatggtcatgggggccaccgttgttatgtacc

SEQ ID NO: 28786 - DNA, 40 bp, Artificial Sequence
  Description of Artificial Sequence: Synthetic primer
atgctaccgggccggccgcccagctgggactgtgcacttg

SEQ ID NO: 28787 - DNA, 40 bp, Artificial Sequence
  Description of Artificial Sequence: Synthetic primer
ggacagcgggtgctgcaggtgagcagctccacagtccagc

SEQ ID NO: 28788 - DNA, 40 bp, Artificial Sequence
  Description of Artificial Sequence: Synthetic primer
tgtttggttgcaaaaacggaataaatgactgagtgttgag

SEQ ID NO: 28789 - DNA, 40 bp, Artificial Sequence
  Description of Artificial Sequence: Synthetic primer
gtaggcgcgggtaaagtcgcgcagcttctcctccatctgc

SEQ ID NO: 28790 - DNA, 40 bp, Artificial Sequence
  Description of Artificial Sequence: Synthetic primer
ccgagtatcaggatttagtgacctaattgaagatgtcaag

SEQ ID NO: 28791 - DNA, 40 bp, Artificial Sequence
  Description of Artificial Sequence: Synthetic primer
atttttaagatcacaagactcaacaatctctttccagttc

SEQ ID NO: 28792 - DNA, 40 bp, Artificial Sequence
  Description of Artificial Sequence: Synthetic primer
aaatttctttcatgtcctccctacttcctcagtgtcaatc

SEQ ID NO: 28793 - DNA, 40 bp, Artificial Sequence
  Description of Artificial Sequence: Synthetic primer
ccaccattgtgcctttggttcttgtcctcaccatcacagc

SEQ ID NO: 28794 - DNA, 40 bp, Artificial Sequence
  Description of Artificial Sequence: Synthetic primer
ggcgctcttgctcctctctccttggcctctcctgggatcg

SEQ ID NO: 28795 - DNA, 40 bp, Artificial Sequence
  Description of Artificial Sequence: Synthetic primer
tggtaacaagacaagaactcaagactgggcttccactagc

SEQ ID NO: 28796 - DNA, 40 bp, Artificial Sequence
  Description of Artificial Sequence: Synthetic primer
tgtgcgctcttcagccaaccccagccattccccacactgc

SEQ ID NO: 28797 - DNA, 40 bp, Artificial Sequence
  Description of Artificial Sequence: Synthetic primer
cagagaacatttcttgaagggtatcacagatgaagctggt

SEQ ID NO: 28798 - DNA, 40 bp, Artificial Sequence
  Description of Artificial Sequence: Synthetic primer
caggacagctgctgtatgccttgagaatgggcaaaagaca

SEQ ID NO: 28799 - DNA, 40 bp, Artificial Sequence
  Description of Artificial Sequence: Synthetic primer
ttgctggcatgtggcatgttcatggcaagtggcacagacg

SEQ ID NO: 28800 - DNA, 40 bp, Artificial Sequence
  Description of Artificial Sequence: Synthetic primer
cacctgtctccctaaggaggcccactcctcccccagaaag

SEQ ID NO: 28801 - DNA, 40 bp, Artificial Sequence
  Description of Artificial Sequence: Synthetic primer
tttgtttgtgatcattgacagatttaagggttgggttttt

SEQ ID NO: 28802 - DNA, 40 bp, Artificial Sequence
  Description of Artificial Sequence: Synthetic primer
gtctggtccatgtatatcaacacaccaattgcatttaagc

SEQ ID NO: 28803 - DNA, 40 bp, Artificial Sequence; identical to SEQ ID NO: 15878
  Description of Artificial Sequence: Synthetic primer

SEQ ID NO: 28804 - DNA, 40 bp, Artificial Sequence
  Description of Artificial Sequence: Synthetic primer
cctaatgaactgattgaactgctggagaagatagttctgg

SEQ ID NO: 28805 - DNA, 40 bp, Artificial Sequence
  Description of Artificial Sequence: Synthetic primer
gagaagtcatgtacacagccttcagagcactgggacgaag

SEQ ID NO: 28806 - DNA, 40 bp, Artificial Sequence
  Description of Artificial Sequence: Synthetic primer
cgcggacccccgcttccgcccccgctggaaggtgatcctg

SEQ ID NO: 28807 - DNA, 40 bp, Artificial Sequence
  Description of Artificial Sequence: Synthetic primer
agtatgatggaacagtgaaagtcaattcagtgatggcaac

SEQ ID NO: 28808 - DNA, 40 bp, Artificial Sequence
  Description of Artificial Sequence: Synthetic primer
tccaaggccattggatcctggaggatggtgcgggatcttt

SEQ ID NO: 28809 - DNA, 40 bp, Artificial Sequence
  Description of Artificial Sequence: Synthetic primer
atgggagtcaagtgtggagtaggttggaagctagctcccc

SEQ ID NO: 28810 - DNA, 40 bp, Artificial Sequence
  Description of Artificial Sequence: Synthetic primer
attattatcattatctgggcaaagcaacgagttctgaagc

SEQ ID NO: 28811 - DNA, 40 bp, Artificial Sequence
  Description of Artificial Sequence: Synthetic primer
caagacaaacaacccttgcaaatgggatttgatacataac

SEQ ID NO: 28812 - DNA, 40 bp, Artificial Sequence
  Description of Artificial Sequence: Synthetic primer
ttccatctgcagcaatatgccagcaccctggggaaagcag

SEQ ID NO: 28813 - DNA, 40 bp, Artificial Sequence
  Description of Artificial Sequence: Synthetic primer
gtagcagtggagatgcttctcggcccagtagtgacaatgc

SEQ ID NO: 28814 - DNA, 40 bp, Artificial Sequence
  Description of Artificial Sequence: Synthetic primer
gacctttgtggtgatgacccctccatgaggagttcagttg

SEQ ID NO: 28815 - DNA, 40 bp, Artificial Sequence
  Description of Artificial Sequence: Synthetic primer
aagtacactttaaaatattttaatcaggcagagttttatg

SEQ ID NO: 28816 - DNA, 40 bp, Artificial Sequence
  Description of Artificial Sequence: Synthetic primer
ctgcccagcagccccaggcagcctcctcactgccacagtc

SEQ ID NO: 28817 - DNA, 40 bp, Artificial Sequence
  Description of Artificial Sequence: Synthetic primer
aaatatggaaaggcaggcgaagtcttcattcataaggata

SEQ ID NO: 28818 - DNA, 40 bp, Artificial Sequence
  Description of Artificial Sequence: Synthetic primer
agctcttgttgctttggcattaatagcagctttagaattg

SEQ ID NO: 28819 - DNA, 40 bp, Artificial Sequence
  Description of Artificial Sequence: Synthetic primer
gcagctggttaatgttaacaaaagaccttgacaggaacat

SEQ ID NO: 28820 - DNA, 40 bp, Artificial Sequence
  Description of Artificial Sequence: Synthetic primer
gccactgtgcagcaggagtcgccactgctaacagccagag

SEQ ID NO: 28821 - DNA, 40 bp, Artificial Sequence
  Description of Artificial Sequence: Synthetic primer
tcattctgccaaaatggatacatgagctccctgggctgag

SEQ ID NO: 28822 - DNA, 40 bp, Artificial Sequence
  Description of Artificial Sequence: Synthetic primer
aatggcaacttgccatgactaagctaggtgtctctcctta

SEQ ID NO: 28823 - DNA, 40 bp, Artificial Sequence
  Description of Artificial Sequence: Synthetic primer
tggagcctagacaaacatcatgccctcaacattcaaagtg

SEQ ID NO: 28824 - DNA, 40 bp, Artificial Sequence
  Description of Artificial Sequence: Synthetic primer
aagattgaagtctggttctgcaaatgcaaagaggcaactg

SEQ ID NO: 28825 - DNA, 40 bp, Artificial Sequence
  Description of Artificial Sequence: Synthetic primer
gcttcgggcgccttttatagaagccccgcgcccggctctg

SEQ ID NO: 28826 - DNA, 40 bp, Artificial Sequence
  Description of Artificial Sequence: Synthetic primer
cttctaggacaaaaccaaacaagtaaggagggaactgttg

SEQ ID NO: 28827 - DNA, 40 bp, Artificial Sequence
  Description of Artificial Sequence: Synthetic primer
atccctactgaggatatcacctagcatacacgacatacag

SEQ ID NO: 28828 - DNA, 40 bp, Artificial Sequence
  Description of Artificial Sequence: Synthetic primer
tcttctccacagtctttcagttttctgccagcaaattttg

SEQ ID NO: 28829 - DNA, 40 bp, Artificial Sequence
  Description of Artificial Sequence: Synthetic primer
agtggtaaatgtgcaggaattgaagaataaccctgcaacc

SEQ ID NO: 28830 - DNA, 40 bp, Artificial Sequence
  Description of Artificial Sequence: Synthetic primer
taccagatgcagaaaaaccagatgcaaagccaacgtcctc

SEQ ID NO: 28831 - DNA, 40 bp, Artificial Sequence
  Description of Artificial Sequence: Synthetic primer
tcaaaagtacgtcaaaaggagcctcacagtcccaggagag

SEQ ID NO: 28832 - DNA, 40 bp, Artificial Sequence
  Description of Artificial Sequence: Synthetic primer
tcaatccaagtggaccaacacccaaataagaaacagagtg

SEQ ID NO: 28833 - DNA, 40 bp, Artificial Sequence
  Description of Artificial Sequence: Synthetic primer
gtttcgccagtagattctcaattgcacccttctgattttg

SEQ ID NO: 28834 - DNA, 40 bp, Artificial Sequence
  Description of Artificial Sequence: Synthetic primer
ccctggtaggctaaacgctgactgaggcccagggtcacga

SEQ ID NO: 28835 - DNA, 40 bp, Artificial Sequence
  Description of Artificial Sequence: Synthetic primer
attattttgaaaattaattccaccatcctttcagattctg

SEQ ID NO: 28836 - DNA, 40 bp, Artificial Sequence
  Description of Artificial Sequence: Synthetic primer
taaagtgagacattgtgaaaaggcaaatttgtatatgtag

SEQ ID NO: 28837 - DNA, 40 bp, Artificial Sequence
  Description of Artificial Sequence: Synthetic primer
ctatgaactattatatagttttaatatactatgtatgtac

SEQ ID NO: 28838 - DNA, 40 bp, Artificial Sequence
  Description of Artificial Sequence: Synthetic primer
catcagaaacacaagtagttaattccacttaaacactacc

SEQ ID NO: 28839 - DNA, 40 bp, Artificial Sequence
  Description of Artificial Sequence: Synthetic primer
agaatgctcaggaatccaaatccccattccctatgtattc

SEQ ID NO: 28840 - DNA, 40 bp, Artificial Sequence
  Description of Artificial Sequence: Synthetic primer
gaaattgcaaatgtaactgtccaatgacttcgggtgaagc

SEQ ID NO: 28841 - DNA, 40 bp, Artificial Sequence
  Description of Artificial Sequence: Synthetic primer
catgtcattggcagtcttcttggactcatctctggcattg

SEQ ID NO: 28842 - DNA, 40 bp, Artificial Sequence
  Description of Artificial Sequence: Synthetic primer
ccactgtgggctgcaagccttcaatagtcatttctgtttg

SEQ ID NO: 28843 - DNA, 40 bp, Artificial Sequence
  Description of Artificial Sequence: Synthetic primer
tctgccactgttctcctacgtggtatgtcttcccatcatc

SEQ ID NO: 28844 - DNA, 40 bp, Artificial Sequence
  Description of Artificial Sequence: Synthetic primer
ctctgcatacttggcagagatggtcttctcctccgccagg

SEQ ID NO: 28845 - DNA, 40 bp, Artificial Sequence
  Description of Artificial Sequence: Synthetic primer
gatctagattgatcacactaaggttgcatttcaactggtc

SEQ ID NO: 28846 - DNA, 40 bp, Artificial Sequence
  Description of Artificial Sequence: Synthetic primer
tcttagaatccacctccttttctcggggtttcttgctcag

SEQ ID NO: 28847 - DNA, 40 bp, Artificial Sequence
  Description of Artificial Sequence: Synthetic primer
atttaatacatcatctaagtcagtaaccgtgttaaacaaa

SEQ ID NO: 28848 - DNA, 40 bp, Artificial Sequence
  Description of Artificial Sequence: Synthetic primer
agcacctcccaggcgctcgatgccagccgtcatcggtttc

SEQ ID NO: 28849 - DNA, 40 bp, Artificial Sequence
  Description of Artificial Sequence: Synthetic primer
ctgacagtgctcaatcaggctgtctgtgatgtcccggatg

SEQ ID NO: 28850 - DNA, 40 bp, Artificial Sequence
  Description of Artificial Sequence: Synthetic primer
cgcgctctcagacatgttgaagcactgcaagcggctgagg

SEQ ID NO: 28851 - DNA, 40 bp, Artificial Sequence
  Description of Artificial Sequence: Synthetic primer
ctttccttcatgggaactcttcttgccacgcaaatcaagc

SEQ ID NO: 28852 - DNA, 40 bp, Artificial Sequence
  Description of Artificial Sequence: Synthetic primer
ttctttagtttgcatgtaacttacgagagtgtctctcagg

SEQ ID NO: 28853 - DNA, 40 bp, Artificial Sequence
  Description of Artificial Sequence: Synthetic primer
ttggaactagaaacaacactcaaggcacagcataaacacc

SEQ ID NO: 28854 - DNA, 40 bp, Artificial Sequence
  Description of Artificial Sequence: Synthetic primer
tgatgatcatgatacagtaggaaattccactttgtacaag

SEQ ID NO: 28855 - DNA, 40 bp, Artificial Sequence
  Description of Artificial Sequence: Synthetic primer
cttatgatttaactgaaagaaaagatttcataaaaacaac

SEQ ID NO: 28856 - DNA, 40 bp, Artificial Sequence
  Description of Artificial Sequence: Synthetic primer
gctaagtaatcctgagcacatttcttcaaggcttcttcat

SEQ ID NO: 28857 - DNA, 40 bp, Artificial Sequence
  Description of Artificial Sequence: Synthetic primer
gaggaatcacctgctttaatacatgttgttctcttctgtg

SEQ ID NO: 28858 - DNA, 40 bp, Artificial Sequence
  Description of Artificial Sequence: Synthetic primer
ccaggtgggagcgcagacggtctcgggtggcaaaagaagc

SEQ ID NO: 28859 - DNA, 40 bp, Artificial Sequence
  Description of Artificial Sequence: Synthetic primer
taccacgtgttttttcagatgttgccacaggtatctcttc

SEQ ID NO: 28860 - DNA, 40 bp, Artificial Sequence
  Description of Artificial Sequence: Synthetic primer
gttgttttctgatgcaaaatgcccggaactttttcttttt

SEQ ID NO: 28861 - DNA, 40 bp, Artificial Sequence
  Description of Artificial Sequence: Synthetic primer
aacttttgagtcaacattttaaaataaatattttgaaaac

SEQ ID NO: 28862 - DNA, 40 bp, Artificial Sequence
  Description of Artificial Sequence: Synthetic primer
gagttcacatattcaaacctgtatctgtgcaggcaatgtg

SEQ ID NO: 28863 - DNA, 40 bp, Artificial Sequence
  Description of Artificial Sequence: Synthetic primer
agggaactggtatacatggatcccaaacttgtcaatctcc

SEQ ID NO: 28864 - DNA, 40 bp, Artificial Sequence
  Description of Artificial Sequence: Synthetic primer
acatggcatcagattcctttatggcaagtcccagtttctc

SEQ ID NO: 28865 - DNA, 40 bp, Artificial Sequence
  Description of Artificial Sequence: Synthetic primer
tgaagatcctcacaccagtgatcttgttggaggcctgatg

SEQ ID NO: 28866 - DNA, 40 bp, Artificial Sequence
  Description of Artificial Sequence: Synthetic primer
tgtctgctccaacctggctgccaagcacagcttctacaac

SEQ ID NO: 28867 - DNA, 40 bp, Artificial Sequence
  Description of Artificial Sequence: Synthetic primer
cttttggaggagaaccaaaacgacaagttccaagaagaag

SEQ ID NO: 28868 - DNA, 40 bp, Artificial Sequence
  Description of Artificial Sequence: Synthetic primer
catcgcctcctcatggccgtcttccgcccggtgttccaag

SEQ ID NO: 28869 - DNA, 40 bp, Artificial Sequence
  Description of Artificial Sequence: Synthetic primer
gctcggccttctgctctggggggagaaggtcgtcctcgtc

SEQ ID NO: 28870 - DNA, 40 bp, Artificial Sequence
  Description of Artificial Sequence: Synthetic primer
cagcagctgcaggagtttggtctgccctttgctgtcatgc

SEQ ID NO: 28871 - DNA, 40 bp, Artificial Sequence
  Description of Artificial Sequence: Synthetic primer
tccctcactctactctcctcactatcggaaattcattttg

SEQ ID NO: 28872 - DNA, 40 bp, Artificial Sequence
  Description of Artificial Sequence: Synthetic primer
ggggtccagggaggccgggagccccagcaacgccgggaag

SEQ ID NO: 28873 - DNA, 40 bp, Artificial Sequence
  Description of Artificial Sequence: Synthetic primer
ggttatttctaaaccacaaaagttgtttaataagtatatc

SEQ ID NO: 28874 - DNA, 40 bp, Artificial Sequence
  Description of Artificial Sequence: Synthetic primer
ttggtgccagagacaccagaaagtcgggagcagaaagatg

SEQ ID NO: 28875 - DNA, 40 bp, Artificial Sequence
  Description of Artificial Sequence: Synthetic primer
acccttgaaccatccatgattgcacagtctggtgttcttg

SEQ ID NO: 28876 - DNA, 40 bp, Artificial Sequence
  Description of Artificial Sequence: Synthetic primer
ccgtcagttccaactgatccggtctaactagcacttcgtg

SEQ ID NO: 28877 - DNA, 40 bp, Artificial Sequence
  Description of Artificial Sequence: Synthetic primer
gagctcttctctgaaattcgatcaacctgaagccagttgc

SEQ ID NO: 28878 - DNA, 40 bp, Artificial Sequence
  Description of Artificial Sequence: Synthetic primer
agtgatggtaagagatctgttatgaaacgaaacacccccc

SEQ ID NO: 28879 - DNA, 40 bp, Artificial Sequence
  Description of Artificial Sequence: Synthetic primer
ggctccctaccttgaggccccgggggctcaggcttcctgg

SEQ ID NO: 28880 - DNA, 40 bp, Artificial Sequence
  Description of Artificial Sequence: Synthetic primer
gcagtgctgcaggctgtgtagacaaccaaagtttacaagg

SEQ ID NO: 28881 - DNA, 40 bp, Artificial Sequence
  Description of Artificial Sequence: Synthetic primer
attcccgggccaaggctgccagagggtcttttctttccac

SEQ ID NO: 28882 - DNA, 40 bp, Artificial Sequence
  Description of Artificial Sequence: Synthetic primer
ttgagaggtttcagcattgagtaatttctgggggaaaagg

SEQ ID NO: 28883 - DNA, 40 bp, Artificial Sequence
  Description of Artificial Sequence: Synthetic primer
accttcaacttccagtatatatagccccagccaagttttc

SEQ ID NO: 28884 - DNA, 40 bp, Artificial Sequence
  Description of Artificial Sequence: Synthetic primer
cattctgcattctaagaactaataacttcatattgtaaac

SEQ ID NO: 28885 - DNA, 40 bp, Artificial Sequence
  Description of Artificial Sequence: Synthetic primer
ccgggttagggcagacgctgtgctcgctggcaccccgaac

SEQ ID NO: 28886 - DNA, 40 bp, Artificial Sequence
  Description of Artificial Sequence: Synthetic primer
gcgccgcgcgccccggaggaaagtcatcgaggggcgtgtg

SEQ ID NO: 28887 - DNA, 40 bp, Artificial Sequence
  Description of Artificial Sequence: Synthetic primer
caggtagggaagcagacaactcgccagataatgcagagtc

SEQ ID NO: 28888 - DNA, 40 bp, Artificial Sequence
  Description of Artificial Sequence: Synthetic primer
acacccggctcggagctgctcatcaccaaggccaagaacg

SEQ ID NO: 28889 - DNA, 40 bp, Artificial Sequence
  Description of Artificial Sequence: Synthetic primer
tctttgccttagctttgcagtgagtgctgctcatgtcctc

SEQ ID NO: 28890 - DNA, 40 bp, Artificial Sequence
  Description of Artificial Sequence: Synthetic primer
tcgaagtcctcttcagagggtgtctttttagatggcagag

SEQ ID NO: 28891 - DNA, 40 bp, Artificial Sequence
  Description of Artificial Sequence: Synthetic primer
aaggtagaatcaccactgagctgccactcttcaggatcag

SEQ ID NO: 28892 - DNA, 40 bp, Artificial Sequence
  Description of Artificial Sequence: Synthetic primer
ccctgtggacttggccaagttaacagcagaagccacaggc

SEQ ID NO: 28893 - DNA, 40 bp, Artificial Sequence
  Description of Artificial Sequence: Synthetic primer
cagttacactatccactgactcctgtgaatcttcactttc

SEQ ID NO: 28894 - DNA, 40 bp, Artificial Sequence
  Description of Artificial Sequence: Synthetic primer
tccacgggttttagaaaaacaagaattacagcagccaacc

SEQ ID NO: 28895 - DNA, 40 bp, Artificial Sequence
  Description of Artificial Sequence: Synthetic primer
tctaaataaaattatacttagcactctttttcatgtaagt

SEQ ID NO: 28896 - DNA, 40 bp, Artificial Sequence
  Description of Artificial Sequence: Synthetic primer
tcaggccagaccctctgggagcttctcagccattttccac

SEQ ID NO: 28897 - DNA, 40 bp, Artificial Sequence
  Description of Artificial Sequence: Synthetic primer
cggtcaaaggctttggtccagccacagccatcaatgtcac

SEQ ID NO: 28898 - DNA, 40 bp, Artificial Sequence
  Description of Artificial Sequence: Synthetic primer
acaaagaatgcagcaggatctgtctagcttattaaagatg

SEQ ID NO: 28899 - DNA, 40 bp, Artificial Sequence
  Description of Artificial Sequence: Synthetic primer
cttctgcccgcttgtcttcttcttaccttgtcctttatac

SEQ ID NO: 28900 - DNA, 40 bp, Artificial Sequence
  Description of Artificial Sequence: Synthetic primer
cccagctctgttgcgcaggaaaagggtgtctacaggaagc

SEQ ID NO: 28901 - DNA, 40 bp, Artificial Sequence
  Description of Artificial Sequence: Synthetic primer
gacaagtcattatttagcaatgttgttaccaaaaataaag

SEQ ID NO: 28902 - DNA, 40 bp, Artificial Sequence
  Description of Artificial Sequence: Synthetic primer
ggatagatgccgtttcctctgctggtctctgggggtgacg

SEQ ID NO: 28903 - DNA, 40 bp, Artificial Sequence
  Description of Artificial Sequence: Synthetic primer
ggagcttgcgattctgaatggcacctacagagatgccaac

SEQ ID NO: 28904 - DNA, 40 bp, Artificial Sequence
  Description of Artificial Sequence: Synthetic primer
agcttggcagtcactacctgaatttggcatcactcacttc

SEQ ID NO: 28905 - DNA, 40 bp, Artificial Sequence
  Description of Artificial Sequence: Synthetic primer
agtccgattatattggtgcgtttttacagttagggttttg

SEQ ID NO: 28906 - DNA, 40 bp, Artificial Sequence
  Description of Artificial Sequence: Synthetic primer
attgattggacgacatatacctgtgtgctaggatttcaag

SEQ ID NO: 28907 - DNA, 40 bp, Artificial Sequence
  Description of Artificial Sequence: Synthetic primer
tccattcctctgaggcagctggtataccgggtccatgctc

SEQ ID NO: 28908 - DNA, 40 bp, Artificial Sequence
  Description of Artificial Sequence: Synthetic primer
gatacatctgggttagaaataattccttttgcagggagtg

SEQ ID NO: 28909 - DNA, 40 bp, Artificial Sequence
  Description of Artificial Sequence: Synthetic primer
ataacatacactactatttttaggagtcaaagtaatgctc

SEQ ID NO: 28910 - DNA, 40 bp, Artificial Sequence
  Description of Artificial Sequence: Synthetic primer
gcccagtacatgctggtggttcacatgcgcagacacactg

SEQ ID NO: 28911 - DNA, 40 bp, Artificial Sequence
  Description of Artificial Sequence: Synthetic primer
ctgaacatggactgtggggttctttcttgattttcagtgg

SEQ ID NO: 28912 - DNA, 40 bp, Artificial Sequence
  Description of Artificial Sequence: Synthetic primer
aaccacttgttgttacatatgctgtcaaacaatttcatgc

SEQ ID NO: 28913 - DNA, 40 bp, Artificial Sequence
  Description of Artificial Sequence: Synthetic primer
atccagcctcacgagggacatatgaattttcattcagcag

SEQ ID NO: 28914 - DNA, 40 bp, Artificial Sequence
  Description of Artificial Sequence: Synthetic primer
gtttaagctgctcaatttgggacttaaacaatttgttttc

SEQ ID NO: 28915 - DNA, 40 bp, Artificial Sequence
  Description of Artificial Sequence: Synthetic primer
tgaccttgtcctatatttataccgcaacaacctgcagagg

SEQ ID NO: 28916 - DNA, 40 bp, Artificial Sequence
  Description of Artificial Sequence: Synthetic primer
tatctgtctccttttcactttcttcagtacataaatacat

SEQ ID NO: 28917 - DNA, 40 bp, Artificial Sequence
  Description of Artificial Sequence: Synthetic primer
aagagatgattttcctatgataaacttcatttcgcatttc

SEQ ID NO: 28918 - DNA, 40 bp, Artificial Sequence
  Description of Artificial Sequence: Synthetic primer
cctcatctgaggagtcagatatggtgatgggcccatctcg

SEQ ID NO: 28919 - DNA, 40 bp, Artificial Sequence
  Description of Artificial Sequence: Synthetic primer
ggtaatactacaccaagaaaccaggttatccctcgaactc

SEQ ID NO: 28920 - DNA, 40 bp, Artificial Sequence
  Description of Artificial Sequence: Synthetic primer
ccaatgacaagccagaattggaaccattcattctttgagg

SEQ ID NO: 28921 - DNA, 40 bp, Artificial Sequence
  Description of Artificial Sequence: Synthetic primer
gtggagattccctgtcttctgagcccgagcccctcattac

SEQ ID NO: 28922 - DNA, 40 bp, Artificial Sequence
  Description of Artificial Sequence: Synthetic primer
gctgaagtacttctctgatcgacactcctttgtggagagg

SEQ ID NO: 28923 - DNA, 40 bp, Artificial Sequence
  Description of Artificial Sequence: Synthetic primer
agacaaaggaaaggctaagaaaaatgctttacgcatcgtc

SEQ ID NO: 28924 - DNA, 40 bp, Artificial Sequence
  Description of Artificial Sequence: Synthetic primer
tatggcgagccctgctgtctccggcccctccccagtcagg

SEQ ID NO: 28925 - DNA, 40 bp, Artificial Sequence
  Description of Artificial Sequence: Synthetic primer
ggctcgaacaaagacatcttcataggaaagccaattatac

SEQ ID NO: 28926 - DNA, 40 bp, Artificial Sequence
  Description of Artificial Sequence: Synthetic primer
cttttcaacaatccatgattctatccagtatgtccagaag

SEQ ID NO: 28927 - DNA, 40 bp, Artificial Sequence
  Description of Artificial Sequence: Synthetic primer
gacacctgtgtcagcatgtgggacctggttctctccatcg

SEQ ID NO: 28928 - DNA, 40 bp, Artificial Sequence
  Description of Artificial Sequence: Synthetic primer
agtgaaaactacaggaattgttgaaacccattttactttc

SEQ ID NO: 28929 - DNA, 40 bp, Artificial Sequence
  Description of Artificial Sequence: Synthetic primer
ggctgggatcagcttgctgcaagcagcacagttccctgtg

SEQ ID NO: 28930 - DNA, 40 bp, Artificial Sequence
  Description of Artificial Sequence: Synthetic primer
aacctggcacagacatgaggcactgaaaatttttcaggag

SEQ ID NO: 28931 - DNA, 40 bp, Artificial Sequence
  Description of Artificial Sequence: Synthetic primer
ctcattggatcctaaggctcaggttaaacttcccggcatc

SEQ ID NO: 28932 - DNA, 40 bp, Artificial Sequence
  Description of Artificial Sequence: Synthetic primer
cacttgttctgcaaagagtgtctcatcagatatgcccaag

SEQ ID NO: 28933 - DNA, 40 bp, Artificial Sequence
  Description of Artificial Sequence: Synthetic primer
atggatcattcttctgtacgatctttactggaagcttgtc

SEQ ID NO: 28934 - DNA, 40 bp, Artificial Sequence
  Description of Artificial Sequence: Synthetic primer
ctcagaggtgaaattggtaaccctggcagagatggtgctc

SEQ ID NO: 28935 - DNA, 40 bp, Artificial Sequence
  Description of Artificial Sequence: Synthetic primer
gtgagtacacattcttactttttaaagatcggaattaaac

SEQ ID NO: 28936 - DNA, 40 bp, Artificial Sequence
  Description of Artificial Sequence: Synthetic primer
gcagacgtactcccagcagcagtaccccagccagcagagc

SEQ ID NO: 28937 - DNA, 40 bp, Artificial Sequence
  Description of Artificial Sequence: Synthetic primer
caagaatggatcacaagatggaatttatcaaaccctagcc

SEQ ID NO: 28938 - DNA, 40 bp, Artificial Sequence
  Description of Artificial Sequence: Synthetic primer
taaaactatttcttccatagacttcaaacaatcaactagc

SEQ ID NO: 28939 - DNA, 40 bp, Artificial Sequence
  Description of Artificial Sequence: Synthetic primer
gaggtgagctgagtggggtgaaggcaggccacacaggaag

SEQ ID NO: 28940 - DNA, 40 bp, Artificial Sequence
  Description of Artificial Sequence: Synthetic primer
ataaataggagagataatggtgtgttttatgtgaagttct

SEQ ID NO: 28941 - DNA, 40 bp, Artificial Sequence
  Description of Artificial Sequence: Synthetic primer
ccgtctctccttgatcaatcacatagaagttatccccttc

SEQ ID NO: 28942 - DNA, 40 bp, Artificial Sequence
  Description of Artificial Sequence: Synthetic primer
aaagtagatttagctgaagattcctttgtttctgactctc

SEQ ID NO: 28943 - DNA, 40 bp, Artificial Sequence
  Description of Artificial Sequence: Synthetic primer
ctctagacaacagataaagcaaattctctcttccaatatc

SEQ ID NO: 28944 - DNA, 40 bp, Artificial Sequence
  Description of Artificial Sequence: Synthetic primer
gtcatttgatgaccctccttcagctaaggcagccattgac

SEQ ID NO: 28945 - DNA, 40 bp, Artificial Sequence
  Description of Artificial Sequence: Synthetic primer
aaactgaacacaagtgccggcaatgtcgatatctataaaa

SEQ ID NO: 28946 - DNA, 40 bp, Artificial Sequence
  Description of Artificial Sequence: Synthetic primer
tttccaagttgcttttctgttatgaaatgttttaattagt

SEQ ID NO: 28947 - DNA, 40 bp, Artificial Sequence
  Description of Artificial Sequence: Synthetic primer
atcctggagcatgcccaccgcggggagcagacaacctccc

SEQ ID NO: 28948 - DNA, 40 bp, Artificial Sequence
  Description of Artificial Sequence: Synthetic primer
tgagatcctctggcacctcccagccccaccctggccatgg

SEQ ID NO: 28949 - DNA, 40 bp, Artificial Sequence
  Description of Artificial Sequence: Synthetic primer
tcggctgctgcggccactggctcctatggtgccgcagcag

SEQ ID NO: 28950 - DNA, 40 bp, Artificial Sequence
  Description of Artificial Sequence: Synthetic primer
gcttcgacacgtcgccactaaacgcttttaacttctttac

SEQ ID NO: 28951 - DNA, 40 bp, Artificial Sequence
  Description of Artificial Sequence: Synthetic primer
gttgcagcgcagctggtccagcacgagatgcgggtccagc

SEQ ID NO: 28952 - DNA, 40 bp, Artificial Sequence
  Description of Artificial Sequence: Synthetic primer
aaaactactcatttcactgactttattcatgacatttttg

SEQ ID NO: 28953 - DNA, 40 bp, Artificial Sequence
  Description of Artificial Sequence: Synthetic primer
gtgtattagcaaacgagtgtctcatgggcagataaagcag

SEQ ID NO: 28954 - DNA, 40 bp, Artificial Sequence
  Description of Artificial Sequence: Synthetic primer
ggaaggcataaggaataaggcaaaaggaactcttttcttg

SEQ ID NO: 28955 - DNA, 40 bp, Artificial Sequence
  Description of Artificial Sequence: Synthetic primer
acaggagtagtatttcccattgattcatcttcagcagcac

SEQ ID NO: 28956 - DNA, 40 bp, Artificial Sequence
  Description of Artificial Sequence: Synthetic primer
agtggaagtgtggagggaggagggggccaggcaggtgtgg

SEQ ID NO: 28957 - DNA, 40 bp, Artificial Sequence
  Description of Artificial Sequence: Synthetic primer
tgaatggaaaggcagaagaccgggaatcacagagcccatc

SEQ ID NO: 28958 - DNA, 40 bp, Artificial Sequence
  Description of Artificial Sequence: Synthetic primer
tcaaaccccacatgtccagccagggggacagttcggcaac

SEQ ID NO: 28959 - DNA, 40 bp, Artificial Sequence
  Description of Artificial Sequence: Synthetic primer
accccaacagcaccgctgcttcctccgcagcctgcaactc

SEQ ID NO: 28960 - DNA, 40 bp, Artificial Sequence
  Description of Artificial Sequence: Synthetic primer
ggcaaccgcggggccccgattaggttggtctcgagacttg

SEQ ID NO: 28961 - DNA, 40 bp, Artificial Sequence
  Description of Artificial Sequence: Synthetic primer
tgtcaggaaggggaagcgggtttcctgcgattctgccttg

SEQ ID NO: 28962 - DNA, 40 bp, Artificial Sequence
  Description of Artificial Sequence: Synthetic primer
caagatcatcaagacagatggcaaagggtggggcctggtc

SEQ ID NO: 28963 - DNA, 40 bp, Artificial Sequence
  Description of Artificial Sequence: Synthetic primer
ttgaaaacgccccaagtatcaccaatgcccagaatcagtc

SEQ ID NO: 28964 - DNA, 40 bp, Artificial Sequence
  Description of Artificial Sequence: Synthetic primer
cgcctaccgcttcgacttccagggcctggcgcaggcctgc

SEQ ID NO: 28965 - DNA, 40 bp, Artificial Sequence
  Description of Artificial Sequence: Synthetic primer
ttccgagggggccggggtggtggggacagaggtggctttg

SEQ ID NO: 28966 - DNA, 40 bp, Artificial Sequence
  Description of Artificial Sequence: Synthetic primer
atttaggaatatggcactcagtccaaatgccattattatc

SEQ ID NO: 28967 - DNA, 40 bp, Artificial Sequence
  Description of Artificial Sequence: Synthetic primer
tcactgacacccatttcctcttggccttggacatcaccag

SEQ ID NO: 28968 - DNA, 40 bp, Artificial Sequence
  Description of Artificial Sequence: Synthetic primer
atacttcagaatttgtttcagaatcagttgcctctttatc

SEQ ID NO: 28969 - DNA, 40 bp, Artificial Sequence
  Description of Artificial Sequence: Synthetic primer
gttctcccctgaggcttttcggagcgagctcctcaaatcg

SEQ ID NO: 28970 - DNA, 40 bp, Artificial Sequence
  Description of Artificial Sequence: Synthetic primer
acattctacgttcccttggggaaatatctgctctgacttc

SEQ ID NO: 28971 - DNA, 40 bp, Artificial Sequence
  Description of Artificial Sequence: Synthetic primer
catctccatgccactgaggctgggcaggctgcccgagatc

SEQ ID NO: 28972 - DNA, 40 bp, Artificial Sequence
  Description of Artificial Sequence: Synthetic primer
ataaagacttgttgggtaaaagatacattgaactcttcag

SEQ ID NO: 28973 - DNA, 40 bp, Artificial Sequence
  Description of Artificial Sequence: Synthetic primer
aaaggtaaactttcttgaaacttaacattctataccaact

SEQ ID NO: 28974 - DNA, 40 bp, Artificial Sequence
  Description of Artificial Sequence: Synthetic primer
ctgagtgggcaaggctggaccctgagccctgggacctctg

SEQ ID NO: 28975 - DNA, 40 bp, Artificial Sequence
  Description of Artificial Sequence: Synthetic primer
ttttatatttcatgttgggttttccctcccactattaaac

SEQ ID NO: 28976 - DNA, 40 bp, Artificial Sequence
  Description of Artificial Sequence: Synthetic primer
tccgccgagggctcgtccgggtttgtccgccgccgtcacc

SEQ ID NO: 28977 - DNA, 40 bp, Artificial Sequence
  Description of Artificial Sequence: Synthetic primer
taaaaatattagctgtgaaatttttctgtgatcgcttttt

SEQ ID NO: 28978 - DNA, 40 bp, Artificial Sequence
  Description of Artificial Sequence: Synthetic primer
agagcacagagagaaggtgaatgccacagaagaaatgctg

SEQ ID NO: 28979 - DNA, 40 bp, Artificial Sequence
  Description of Artificial Sequence: Synthetic primer
ttggggaggggaaatcttttctttctttcccccttaaaaa

SEQ ID NO: 28980 - DNA, 40 bp, Artificial Sequence
  Description of Artificial Sequence: Synthetic primer
aaaaatgttttgtgtgaaacacattttctgactggggaac

SEQ ID NO: 28981 - DNA, 40 bp, Artificial Sequence
  Description of Artificial Sequence: Synthetic primer
atcattcagtttaaagggatcaggagaatccaatttgttg

SEQ ID NO: 28982 - DNA, 40 bp, Artificial Sequence
  Description of Artificial Sequence: Synthetic primer
actggtgcctttgcattcagaaggagagctgtcagcgtag

SEQ ID NO: 28983 - DNA, 40 bp, Artificial Sequence
  Description of Artificial Sequence: Synthetic primer
tggctgtgaaggttaacgggataaagccctcactgtcagc

SEQ ID NO: 28984 - DNA, 40 bp, Artificial Sequence
  Description of Artificial Sequence: Synthetic primer
gttgcttattatcatctcacgccctgcgaggctgctggag

SEQ ID NO: 28985 - DNA, 40 bp, Artificial Sequence
  Description of Artificial Sequence: Synthetic primer
cagagtccacagaatcatggcggaacagggagggctggtg

SEQ ID NO: 28986 - DNA, 40 bp, Artificial Sequence
  Description of Artificial Sequence: Synthetic primer
cctgtcgcggcccaagcgcttcgaggtggccacctcgctc

SEQ ID NO: 28987 - DNA, 40 bp, Artificial Sequence
  Description of Artificial Sequence: Synthetic primer
cactgaaagacccccccatgtcccctgatcctgagtcacc

SEQ ID NO: 28988 - DNA, 40 bp, Artificial Sequence
  Description of Artificial Sequence: Synthetic primer
atgcagacaggtcagtattttctttctgtgctaaaactgc

SEQ ID NO: 28989 - DNA, 40 bp, Artificial Sequence
  Description of Artificial Sequence: Synthetic primer
tgttgctgggggggcttccttcctccagtaagctggccac

SEQ ID NO: 28990 - DNA, 40 bp, Artificial Sequence
  Description of Artificial Sequence: Synthetic primer
atggagatgtcatgggcgcgacagagcctggcggggatac

SEQ ID NO: 28991 - DNA, 40 bp, Artificial Sequence
  Description of Artificial Sequence: Synthetic primer
ccagctccggcagctctcccagggctccgaggagtatgag

SEQ ID NO: 28992 - DNA, 40 bp, Artificial Sequence
  Description of Artificial Sequence: Synthetic primer
aaatactctacattgatcatggaggccaaatcctgtagtc

SEQ ID NO: 28993 - DNA, 40 bp, Artificial Sequence
  Description of Artificial Sequence: Synthetic primer
ttctctgttattcctgatcctaagtcatgtatatcgaagg

SEQ ID NO: 28994 - DNA, 40 bp, Artificial Sequence
  Description of Artificial Sequence: Synthetic primer
aaaccccaccgtccaagctgggagagcttctgtttccaag

SEQ ID NO: 28995 - DNA, 40 bp, Artificial Sequence
  Description of Artificial Sequence: Synthetic primer
tgtatataacatgtgtcatgtcctttggaaacctggtcac

SEQ ID NO: 28996 - DNA, 40 bp, Artificial Sequence
  Description of Artificial Sequence: Synthetic primer
acactggtgtgaatactgtgccaactttatgtggggtctc

SEQ ID NO: 28997 - DNA, 40 bp, Artificial Sequence
  Description of Artificial Sequence: Synthetic primer
gcctggtccagctggctccaaaggagagagcggtaacaag

SEQ ID NO: 28998 - DNA, 40 bp, Artificial Sequence
  Description of Artificial Sequence: Synthetic primer
tttttttcttcctattgcagttaaagggccattgccagtc

SEQ ID NO: 28999 - DNA, 40 bp, Artificial Sequence
  Description of Artificial Sequence: Synthetic primer
tagatgccacaactcttcagagagctgactgcctggttcc

SEQ ID NO: 29000 - DNA, 40 bp, Artificial Sequence
  Description of Artificial Sequence: Synthetic primer
tatctggcaaggaaaccccatacagaagaaacaacaaacc

SEQ ID NO: 29001 - DNA, 40 bp, Artificial Sequence
  Description of Artificial Sequence: Synthetic primer
gtactgccccaaagagcaggcgcagcctccccacctctgg

SEQ ID NO: 29002 - DNA, 40 bp, Artificial Sequence
  Description of Artificial Sequence: Synthetic primer
cagacactgccccagcagcacctcgctcccagccctgctc

SEQ ID NO: 29003 - DNA, 40 bp, Artificial Sequence
  Description of Artificial Sequence: Synthetic primer
taaaattcagttttccatctgttacatagtatatactagg

SEQ ID NO: 29004 - DNA, 40 bp, Artificial Sequence; identical to SEQ ID NO: 1557
  Description of Artificial Sequence: Synthetic primer

SEQ ID NO: 29005 - DNA, 40 bp, Artificial Sequence
  Description of Artificial Sequence: Synthetic primer
ggcggaggggacagcgcccgccggaccctgcagcccagac

SEQ ID NO: 29006 - DNA, 40 bp, Artificial Sequence
  Description of Artificial Sequence: Synthetic primer
gagccagtatttcaaagcccagacggaagctcggaaacag

SEQ ID NO: 29007 - DNA, 40 bp, Artificial Sequence
  Description of Artificial Sequence: Synthetic primer
tttccagcttcatctaagatctgtctgatggcctgctcac

SEQ ID NO: 29008 - DNA, 40 bp, Artificial Sequence
  Description of Artificial Sequence: Synthetic primer
ttgtaagatgactaattttaaaagaacctgccctgaaaag

SEQ ID NO: 29009 - DNA, 40 bp, Artificial Sequence
  Description of Artificial Sequence: Synthetic primer
gccttgcatctagccacagagatggaggagctggggttgg

SEQ ID NO: 29010 - DNA, 40 bp, Artificial Sequence
  Description of Artificial Sequence: Synthetic primer
tttccatgtcagatcctcccaaggcaccaacatctgacac

SEQ ID NO: 29011 - DNA, 40 bp, Artificial Sequence
  Description of Artificial Sequence: Synthetic primer
cctttccatgtgtccactgtttccttgtgccttttgatta

SEQ ID NO: 29012 - DNA, 40 bp, Artificial Sequence
  Description of Artificial Sequence: Synthetic primer
gatatttgctcctaagaaaaaacaaaagaaggtacaggag

SEQ ID NO: 29013 - DNA, 40 bp, Artificial Sequence
  Description of Artificial Sequence: Synthetic primer
tctctagttacaaagtttgttagagtttgaaaaacaaacc

SEQ ID NO: 29014 - DNA, 40 bp, Artificial Sequence
  Description of Artificial Sequence: Synthetic primer
atcccatccctgaggattgggctggtacccgcgtctctcg

SEQ ID NO: 29015 - DNA, 40 bp, Artificial Sequence
  Description of Artificial Sequence: Synthetic primer
tgaagactctgtggttgaccacttcttcattagttacctg

SEQ ID NO: 29016 - DNA, 40 bp, Artificial Sequence
  Description of Artificial Sequence: Synthetic primer
atcagtaggtgggaagtccatataggggttcagaccactg

SEQ ID NO: 29017 - DNA, 40 bp, Artificial Sequence
  Description of Artificial Sequence: Synthetic primer
cagcagctctggaacttagtatttctgccccgagttttgc

SEQ ID NO: 29018 - DNA, 40 bp, Artificial Sequence
  Description of Artificial Sequence: Synthetic primer
tgaactgtccgtgaatggtctctgtcaagcgggccgtctc

SEQ ID NO: 29019 - DNA, 40 bp, Artificial Sequence
  Description of Artificial Sequence: Synthetic primer
ttactaggtacataagcttctcaatgagtcaccattcttc

SEQ ID NO: 29020 - DNA, 40 bp, Artificial Sequence
  Description of Artificial Sequence: Synthetic primer
tgtgcaacaggaaaaccaccttctcaaagatgaactggag

SEQ ID NO: 29021 - DNA, 40 bp, Artificial Sequence
  Description of Artificial Sequence: Synthetic primer
ttgttagaaaaccattcaaaaaaagtgtaccaaaaagggg

SEQ ID NO: 29022 - DNA, 40 bp, Artificial Sequence
  Description of Artificial Sequence: Synthetic primer
agtgttcaatatcaagtgataccacagatccagtcagcag

SEQ ID NO: 29023 - DNA, 40 bp, Artificial Sequence
  Description of Artificial Sequence: Synthetic primer
ctgacaagttttgaaagacatgttgctgcaaggagctgag

SEQ ID NO: 29024 - DNA, 40 bp, Artificial Sequence
  Description of Artificial Sequence: Synthetic primer
actaaaacagtactggcctttccaatcctctttcttcctg

SEQ ID NO: 29025 - DNA, 40 bp, Artificial Sequence
  Description of Artificial Sequence: Synthetic primer
agcaaccacgtggccagtggcgccggggaggcaggtaggg

SEQ ID NO: 29026 - DNA, 40 bp, Artificial Sequence
  Description of Artificial Sequence: Synthetic primer
tttggaggcaaactcttttcaacatcagccttaattcgac

SEQ ID NO: 29027 - DNA, 40 bp, Artificial Sequence
  Description of Artificial Sequence: Synthetic primer
tggggggaagttatgttcctcctgtagaggtgaattaagt

SEQ ID NO: 29028 - DNA, 40 bp, Artificial Sequence
  Description of Artificial Sequence: Synthetic primer
tcagtaaaagatgttaaatgaatgactttgctgctttctg

SEQ ID NO: 29029 - DNA, 40 bp, Artificial Sequence
  Description of Artificial Sequence: Synthetic primer
aagaagaaagcttcatcaaagaaacaaaagacagaaaatg

SEQ ID NO: 29030 - DNA, 40 bp, Artificial Sequence
  Description of Artificial Sequence: Synthetic primer
gctccaaaggggactttctggccctccgtgccccctaacc

SEQ ID NO: 29031 - DNA, 40 bp, Artificial Sequence
  Description of Artificial Sequence: Synthetic primer
gtctttctgtccacatggaacaaactgaggagatcgcttg

SEQ ID NO: 29032 - DNA, 40 bp, Artificial Sequence
  Description of Artificial Sequence: Synthetic primer
cattatattttgcacattatatttaataaaatgtgtcaat

SEQ ID NO: 29033 - DNA, 40 bp, Artificial Sequence
  Description of Artificial Sequence: Synthetic primer
cactggggtagttggcattgggcaaggcattatagtttgg

SEQ ID NO: 29034 - DNA, 40 bp, Artificial Sequence
  Description of Artificial Sequence: Synthetic primer
gtcggaggtgttcccggagtcggaggtgtcccgggagttg

SEQ ID NO: 29035 - DNA, 40 bp, Artificial Sequence
  Description of Artificial Sequence: Synthetic primer
agtgtcactctgcgactcagaaaagtactcctgtaaaatc

SEQ ID NO: 29036 - DNA, 40 bp, Artificial Sequence
  Description of Artificial Sequence: Synthetic primer
cacgagtcaggctggcgctgggcaacagggggccaccagg

SEQ ID NO: 29037 - DNA, 40 bp, Artificial Sequence
  Description of Artificial Sequence: Synthetic primer
ccagctccacccgaaggtgccactccaacgagccctgtcg

SEQ ID NO: 29038 - DNA, 40 bp, Artificial Sequence
  Description of Artificial Sequence: Synthetic primer
gctgtttgtgtctggctaatgttgacaatagtggaaatgg

SEQ ID NO: 29039 - DNA, 40 bp, Artificial Sequence
  Description of Artificial Sequence: Synthetic primer
aacaggcgttctaggaaagttggatcagaacacatgtacc

SEQ ID NO: 29040 - DNA, 40 bp, Artificial Sequence
  Description of Artificial Sequence: Synthetic primer
taaaggtgttgtcccttctagggttattgcatttggattg

SEQ ID NO: 29041 - DNA, 40 bp, Artificial Sequence
  Description of Artificial Sequence: Synthetic primer
tgcactctgtccggtgtagctgtacagggcctgtgccagg

SEQ ID NO: 29042 - DNA, 40 bp, Artificial Sequence
  Description of Artificial Sequence: Synthetic primer
gatttaagacagcaaaaccaagcattggaaaagcagttag

SEQ ID NO: 29043 - DNA, 40 bp, Artificial Sequence
  Description of Artificial Sequence: Synthetic primer
ggtttttggtcctggaaatgagggccgattgtaacttttc

SEQ ID NO: 29044 - DNA, 40 bp, Artificial Sequence
  Description of Artificial Sequence: Synthetic primer
tcttcaaggcaattctttcacataggaggaacaatcatgc

SEQ ID NO: 29045 - DNA, 40 bp, Artificial Sequence
  Description of Artificial Sequence: Synthetic primer
gcctgctctttggcctttttgctgcgtttccatttcatcc

SEQ ID NO: 29046 - DNA, 40 bp, Artificial Sequence
  Description of Artificial Sequence: Synthetic primer
cccactccgccaccgctgtctccacagtgaaccgacactc

SEQ ID NO: 29047 - DNA, 40 bp, Artificial Sequence
  Description of Artificial Sequence: Synthetic primer
tccaagacaaccgagtgcactgctgcctatacttcatctc

SEQ ID NO: 29048 - DNA, 40 bp, Artificial Sequence
  Description of Artificial Sequence: Synthetic primer
atgccgtaactgctgttcggcagttgttgtcaaaagctgc

SEQ ID NO: 29049 - DNA, 40 bp, Artificial Sequence
  Description of Artificial Sequence: Synthetic primer
tgagctgcagtacaggaaccggggagacccctgggctgtg

SEQ ID NO: 29050 - DNA, 40 bp, Artificial Sequence
  Description of Artificial Sequence: Synthetic primer
gaaatcatgccttacagagcttgatatcatctgaaaactt

SEQ ID NO: 29051 - DNA, 40 bp, Artificial Sequence
  Description of Artificial Sequence: Synthetic primer
actcggggaggaggagttggaagcataggaggaggaggag

SEQ ID NO: 29052 - DNA, 40 bp, Artificial Sequence
  Description of Artificial Sequence: Synthetic primer
ctgcaatcttggggtccaggaggtagtggtagctataaac

SEQ ID NO: 29053 - DNA, 40 bp, Artificial Sequence
  Description of Artificial Sequence: Synthetic primer
ccggaggggttcacaaagtgctttgtcaggactgctgcag

SEQ ID NO: 29054 - DNA, 40 bp, Artificial Sequence
  Description of Artificial Sequence: Synthetic primer
agcataagatcttggaataataaaatcacaatcttaggag

SEQ ID NO: 29055 - DNA, 40 bp, Artificial Sequence
  Description of Artificial Sequence: Synthetic primer
gttatcgatcttcttaagtattttatccatctcatctatc

SEQ ID NO: 29056 - DNA, 40 bp, Artificial Sequence
  Description of Artificial Sequence: Synthetic primer
tcttctaccccgtgcctgtgactcagactgggaaatactg

SEQ ID NO: 29057 - DNA, 40 bp, Artificial Sequence
  Description of Artificial Sequence: Synthetic primer
ctaaaagatagggaattataggagttgggatacatgttag

SEQ ID NO: 29058 - DNA, 40 bp, Artificial Sequence
  Description of Artificial Sequence: Synthetic primer
ttgggttctgacaaggagacacttgtatcactctgattgg

SEQ ID NO: 29059 - DNA, 40 bp, Artificial Sequence
  Description of Artificial Sequence: Synthetic primer
tgagtatttttgtattaaaaacattttaaaggcttttttc

SEQ ID NO: 29060 - DNA, 40 bp, Artificial Sequence
  Description of Artificial Sequence: Synthetic primer
cgtgtgcttgcgtgtgtgcgcgcgcgtgtctgtagttttg

SEQ ID NO: 29061 - DNA, 40 bp, Artificial Sequence
  Description of Artificial Sequence: Synthetic primer
cattcaacattagttgtctagaagcatccatgcttgacac

SEQ ID NO: 29062 - DNA, 40 bp, Artificial Sequence
  Description of Artificial Sequence: Synthetic primer
actgacaggggaatactacgtggagaatgccgatggcaag

SEQ ID NO: 29063 - DNA, 40 bp, Artificial Sequence
  Description of Artificial Sequence: Synthetic primer
cctccacggcctcccatgcgacccatgggtcccccaggac

SEQ ID NO: 29064 - DNA, 40 bp, Artificial Sequence
  Description of Artificial Sequence: Synthetic primer
caccgcggccgctgcagcagacgcccggctcgccccgcag

SEQ ID NO: 29065 - DNA, 40 bp, Artificial Sequence
  Description of Artificial Sequence: Synthetic primer
gcacatattaactggtctggtaaggcaaagaagttttcat

SEQ ID NO: 29066 - DNA, 40 bp, Artificial Sequence
  Description of Artificial Sequence: Synthetic primer
ttcttccattgtcgtcttttctattgagggttgggatttg

SEQ ID NO: 29067 - DNA, 40 bp, Artificial Sequence
  Description of Artificial Sequence: Synthetic primer
ctgccctagagaggagtgactgggatcatctggggcctta

SEQ ID NO: 29068 - DNA, 40 bp, Artificial Sequence
  Description of Artificial Sequence: Synthetic primer
acagttggcatcatttttacagtcacagccactgggggcc

SEQ ID NO: 29069 - DNA, 40 bp, Artificial Sequence
  Description of Artificial Sequence: Synthetic primer
gttttctctccctttctcccttcacagcaaatattccaag

SEQ ID NO: 29070 - DNA, 40 bp, Artificial Sequence
  Description of Artificial Sequence: Synthetic primer
gaacagaggtctaggatctttgttctcagggtcgctgcta

SEQ ID NO: 29071 - DNA, 40 bp, Artificial Sequence
  Description of Artificial Sequence: Synthetic primer
gctcttccgcggggctctaggttccaccggcgcttacctc

SEQ ID NO: 29072 - DNA, 40 bp, Artificial Sequence
  Description of Artificial Sequence: Synthetic primer
catgtattggccatttccgctacagagcacggggcaggag

SEQ ID NO: 29073 - DNA, 40 bp, Artificial Sequence
  Description of Artificial Sequence: Synthetic primer
ttgatggtaccatgagagtttccacctttttatcctggtc

SEQ ID NO: 29074 - DNA, 40 bp, Artificial Sequence
  Description of Artificial Sequence: Synthetic primer
ctcgtccaactggtccctcagtcacacatgccagagattg

SEQ ID NO: 29075 - DNA, 40 bp, Artificial Sequence
  Description of Artificial Sequence: Synthetic primer
aagagttcaggcaggcctgtgagagagccctggaagcaag

SEQ ID NO: 29076 - DNA, 40 bp, Artificial Sequence
  Description of Artificial Sequence: Synthetic primer
tcacctttcttctccctcctttttgccctctccttcagtg

SEQ ID NO: 29077 - DNA, 40 bp, Artificial Sequence
  Description of Artificial Sequence: Synthetic primer
acatataatatactatacagatgtggaaaaatctagttag

SEQ ID NO: 29078 - DNA, 40 bp, Artificial Sequence
  Description of Artificial Sequence: Synthetic primer
ttgctacaaatacaatcccccagaccacgaggttgtggcc

SEQ ID NO: 29079 - DNA, 40 bp, Artificial Sequence
  Description of Artificial Sequence: Synthetic primer
aacagggttctgtctccgctgccaccgtttctgatgaatg

SEQ ID NO: 29080 - DNA, 40 bp, Artificial Sequence
  Description of Artificial Sequence: Synthetic primer
cattcgcctctcacgcagacaccccggcctgaacatgtgg

SEQ ID NO: 29081 - DNA, 40 bp, Artificial Sequence
  Description of Artificial Sequence: Synthetic primer
ttgtacttttcattttggctcaccgtggattttctcatag

SEQ ID NO: 29082 - DNA, 40 bp, Artificial Sequence
  Description of Artificial Sequence: Synthetic primer
atctgcttggagtttacttctagggaatttcatgctggac

SEQ ID NO: 29083 - DNA, 40 bp, Artificial Sequence
  Description of Artificial Sequence: Synthetic primer
gccaggcttgcccgcctcgccgcggccgagcgtcccgccc

SEQ ID NO: 29084 - DNA, 40 bp, Artificial Sequence
  Description of Artificial Sequence: Synthetic primer
gtcatattgttgtcccttcttccgcctgccacacttattg

SEQ ID NO: 29085 - DNA, 40 bp, Artificial Sequence
  Description of Artificial Sequence: Synthetic primer
tttgctccagtacctacacctgttttctccatctcaagtc

SEQ ID NO: 29086 - DNA, 40 bp, Artificial Sequence
  Description of Artificial Sequence: Synthetic primer
agcgggcagctgagcagcagcaagaagcccgcccggaaag

SEQ ID NO: 29087 - DNA, 40 bp, Artificial Sequence
  Description of Artificial Sequence: Synthetic primer
gtttccagtggcagcagtacagcattactttatagcaaac

SEQ ID NO: 29088 - DNA, 40 bp, Artificial Sequence
  Description of Artificial Sequence: Synthetic primer
cttctctttcatttccttcccggcccctttaactgcattg

SEQ ID NO: 29089 - DNA, 40 bp, Artificial Sequence
  Description of Artificial Sequence: Synthetic primer
tcccttcatctggctatggcaccaacacgcccagttccac

SEQ ID NO: 29090 - DNA, 40 bp, Artificial Sequence
  Description of Artificial Sequence: Synthetic primer
agggggagaatggctttggcattcacagccaggacactcc

SEQ ID NO: 29091 - DNA, 40 bp, Artificial Sequence
  Description of Artificial Sequence: Synthetic primer
tctgagcacccacccattttttgacacagctgaaccagac

SEQ ID NO: 29092 - DNA, 40 bp, Artificial Sequence
  Description of Artificial Sequence: Synthetic primer
gcatctgaaaaagctgtggaaggctctggataaggaccag

SEQ ID NO: 29093 - DNA, 40 bp, Artificial Sequence
  Description of Artificial Sequence: Synthetic primer
tttctcaggcagcggcagcgcccccggcaggcgcggtggc

SEQ ID NO: 29094 - DNA, 40 bp, Artificial Sequence
  Description of Artificial Sequence: Synthetic primer
gcagcctcctcagcccgcctgcccgagcgcgagcagccag

SEQ ID NO: 29095 - DNA, 40 bp, Artificial Sequence
  Description of Artificial Sequence: Synthetic primer
ggagagctttctaagattgaccttttgatagctggggttc

SEQ ID NO: 29096 - DNA, 40 bp, Artificial Sequence
  Description of Artificial Sequence: Synthetic primer
tgcagtacctctacgcaaagtaaaagtagcagtggttcag

SEQ ID NO: 29097 - DNA, 40 bp, Artificial Sequence
  Description of Artificial Sequence: Synthetic primer
agtgagcccagctgcaagggcggcctgcccagggacaaac

SEQ ID NO: 29098 - DNA, 40 bp, Artificial Sequence
  Description of Artificial Sequence: Synthetic primer
caatctcttggtttgctgtttggtaaagcatcggttaatg

SEQ ID NO: 29099 - DNA, 40 bp, Artificial Sequence
  Description of Artificial Sequence: Synthetic primer
agggtacatgtcctttgaccctccacaaaagaacaagcag

SEQ ID NO: 29100 - DNA, 40 bp, Artificial Sequence
  Description of Artificial Sequence: Synthetic primer
gctgctgcgtgcacagattgtggaaaagctcctccgcttg

SEQ ID NO: 29101 - DNA, 40 bp, Artificial Sequence
  Description of Artificial Sequence: Synthetic primer
gaaccagatcgggagtggcaccatggacctgcccttccag

SEQ ID NO: 29102 - DNA, 40 bp, Artificial Sequence
  Description of Artificial Sequence: Synthetic primer
aagacagagctggaagacacactggacagcacagccactc

SEQ ID NO: 29103 - DNA, 40 bp, Artificial Sequence
  Description of Artificial Sequence: Synthetic primer
gggtatgacgaaaatggagcagctcgctgggacttaattt

SEQ ID NO: 29104 - DNA, 40 bp, Artificial Sequence
  Description of Artificial Sequence: Synthetic primer
actcagttgaaatggtttgggctggggtataacattcaag

SEQ ID NO: 29105 - DNA, 40 bp, Artificial Sequence
  Description of Artificial Sequence: Synthetic primer
caatgaataagtatttgtgtaatatttactccattgtctc

SEQ ID NO: 29106 - DNA, 40 bp, Artificial Sequence
  Description of Artificial Sequence: Synthetic primer
tctggctcagtccctcaattgccctgtgcattccaatatc

SEQ ID NO: 29107 - DNA, 40 bp, Artificial Sequence
  Description of Artificial Sequence: Synthetic primer
taactggccctctagtgttctagttaatcctgagcagctt

SEQ ID NO: 29108 - DNA, 40 bp, Artificial Sequence
  Description of Artificial Sequence: Synthetic primer
tcaaccggctaggatatgcccactggattggactgttcac

SEQ ID NO: 29109 - DNA, 40 bp, Artificial Sequence
  Description of Artificial Sequence: Synthetic primer
ttgagagtaaagtgctgccctctgcccccaacacacacac

SEQ ID NO: 29110 - DNA, 40 bp, Artificial Sequence
  Description of Artificial Sequence: Synthetic primer
tgaccgggcaaactttttctgacaacttggccaccgacag

SEQ ID NO: 29111 - DNA, 40 bp, Artificial Sequence
  Description of Artificial Sequence: Synthetic primer
ccaccccccgccccgccacaccgccccccgtttccctttg

SEQ ID NO: 29112 - DNA, 40 bp, Artificial Sequence
  Description of Artificial Sequence: Synthetic primer
gggccgtccccagccctgagcggttcttcatgcccctgta

SEQ ID NO: 29113 - DNA, 40 bp, Artificial Sequence
  Description of Artificial Sequence: Synthetic primer
caagcatggaagaaaaaatcgcgtatcagtcctatgaacg

SEQ ID NO: 29114 - DNA, 40 bp, Artificial Sequence
  Description of Artificial Sequence: Synthetic primer
tgtaaggagagcttcagtggcacctcaaaacccacccttc

SEQ ID NO: 29115 - DNA, 40 bp, Artificial Sequence
  Description of Artificial Sequence: Synthetic primer
aaggctgtgacgcttgccattggagacggagccaatgatg

SEQ ID NO: 29116 - DNA, 40 bp, Artificial Sequence
  Description of Artificial Sequence: Synthetic primer
gaattattaccccctgctccaaagggcaaaggtcggaagc

SEQ ID NO: 29117 - DNA, 40 bp, Artificial Sequence
  Description of Artificial Sequence: Synthetic primer
actcggcattgaagtcgttcttgtagctctggcgctgctc

SEQ ID NO: 29118 - DNA, 40 bp, Artificial Sequence
  Description of Artificial Sequence: Synthetic primer
ctctggagtctctctcctggaaaactgtgcagggcctctc

SEQ ID NO: 29119 - DNA, 40 bp, Artificial Sequence
  Description of Artificial Sequence: Synthetic primer
tccaaacctcagaagagggcaggctgacaaggctaaaagc

SEQ ID NO: 29120 - DNA, 40 bp, Artificial Sequence
  Description of Artificial Sequence: Synthetic primer
ttctaagccatgtttccgaagacgttccacaaaggctgag

SEQ ID NO: 29121 - DNA, 40 bp, Artificial Sequence
  Description of Artificial Sequence: Synthetic primer
cctccaccagatcacagatgattttgttgttgaaatactg

SEQ ID NO: 29122 - DNA, 40 bp, Artificial Sequence
  Description of Artificial Sequence: Synthetic primer
ccctcagtgccctacccaaggaacgggactcatcttctga

SEQ ID NO: 29123 - DNA, 40 bp, Artificial Sequence
  Description of Artificial Sequence: Synthetic primer
gctgagccagcagcccctgggccccgctcacccattcaac

SEQ ID NO: 29124 - DNA, 40 bp, Artificial Sequence
  Description of Artificial Sequence: Synthetic primer
gctgctcctgcttcttgagcagtttcttcttctgggagat

SEQ ID NO: 29125 - DNA, 40 bp, Artificial Sequence
  Description of Artificial Sequence: Synthetic primer
atgcacaacctcccactaccacccaatctgcctgccacag

SEQ ID NO: 29126 - DNA, 40 bp, Artificial Sequence
  Description of Artificial Sequence: Synthetic primer
tacccagcctagagtttatttcactggatcagatgtttcg

SEQ ID NO: 29127 - DNA, 40 bp, Artificial Sequence
  Description of Artificial Sequence: Synthetic primer
aatggttcgagttcctttccttggaggtcttatccaacat

SEQ ID NO: 29128 - DNA, 40 bp, Artificial Sequence
  Description of Artificial Sequence: Synthetic primer
aggtattggtgtgatgcagagtatgacgcatacaggagag

SEQ ID NO: 29129 - DNA, 40 bp, Artificial Sequence
  Description of Artificial Sequence: Synthetic primer
tggatattatggaactcgatatccagatataaataagtgt

SEQ ID NO: 29130 - DNA, 40 bp, Artificial Sequence
  Description of Artificial Sequence: Synthetic primer
tatttggccagctgctgctgtgttttatggcagtgttcag

SEQ ID NO: 29131 - DNA, 40 bp, Artificial Sequence
  Description of Artificial Sequence: Synthetic primer
tcacaacagccagggaacccagtccaacacccgccatctg

SEQ ID NO: 29132 - DNA, 40 bp, Artificial Sequence
  Description of Artificial Sequence: Synthetic primer
ataaaacggcgctatactaatccaataggacgtccaaaaa

SEQ ID NO: 29133 - DNA, 40 bp, Artificial Sequence
  Description of Artificial Sequence: Synthetic primer
gaattggcaggagtagctgatttctctgccacctatcttc

SEQ ID NO: 29134 - DNA, 40 bp, Artificial Sequence
  Description of Artificial Sequence: Synthetic primer
caggtattccggtcaaacactggcatcaccacaggtagtc

SEQ ID NO: 29135 - DNA, 40 bp, Artificial Sequence
  Description of Artificial Sequence: Synthetic primer
atagaaattgaattttccaaacctgttacaagggcatttc

SEQ ID NO: 29136 - DNA, 40 bp, Artificial Sequence
  Description of Artificial Sequence: Synthetic primer
tagaggatgatccttcctcagattatattaatgccaacta

SEQ ID NO: 29137 - DNA, 40 bp, Artificial Sequence
  Description of Artificial Sequence: Synthetic primer
gatcatatgtttgtgctccaaactgaagtagcattgtctc

SEQ ID NO: 29138 - DNA, 40 bp, Artificial Sequence
  Description of Artificial Sequence: Synthetic primer
aaagctttaaaaattgtcagagcaaaccctatagcaaacc

SEQ ID NO: 29139 - DNA, 40 bp, Artificial Sequence
  Description of Artificial Sequence: Synthetic primer
acaagacactgtttcatagtcattaaggcacaggaagagc

SEQ ID NO: 29140 - DNA, 40 bp, Artificial Sequence
  Description of Artificial Sequence: Synthetic primer
gagcctctcgggctcatacaaggttgatgacattgacgac

SEQ ID NO: 29141 - DNA, 40 bp, Artificial Sequence
  Description of Artificial Sequence: Synthetic primer
tcttctgcttcttcctatactgggcagtctcagctgtacg

SEQ ID NO: 29142 - DNA, 40 bp, Artificial Sequence
  Description of Artificial Sequence: Synthetic primer
agtgggcagtgcccgcgccatggggtgctctgtgggcttc

SEQ ID NO: 29143 - DNA, 40 bp, Artificial Sequence
  Description of Artificial Sequence: Synthetic primer
gctatagatgaagtgaaaagacagtggagagaagaagttg

SEQ ID NO: 29144 - DNA, 40 bp, Artificial Sequence
  Description of Artificial Sequence: Synthetic primer
gctgaaacttgtcttgttttgccaggaaaggaagtagttg

SEQ ID NO: 29145 - DNA, 40 bp, Artificial Sequence
  Description of Artificial Sequence: Synthetic primer
ttttatttatatcttgttattaatgtttcttctccaattc

SEQ ID NO: 29146 - DNA, 40 bp, Artificial Sequence
  Description of Artificial Sequence: Synthetic primer
ttatgtacaaaccaaggggtgtttttagaacattgtatag

SEQ ID NO: 29147 - DNA, 40 bp, Artificial Sequence
  Description of Artificial Sequence: Synthetic primer
attttaggcagacagtgattatgctggtgaatactaaaag

SEQ ID NO: 29148 - DNA, 40 bp, Artificial Sequence
  Description of Artificial Sequence: Synthetic primer
ttgctgtcattcatgactatgcagattgggttaaagaagc

SEQ ID NO: 29149 - DNA, 40 bp, Artificial Sequence
  Description of Artificial Sequence: Synthetic primer
ccaggtccccaggcgcacggtgagcagcgagtccttcttc

SEQ ID NO: 29150 - DNA, 40 bp, Artificial Sequence
  Description of Artificial Sequence: Synthetic primer
agatgacttctgatatcatgtttgccatgtgttgtggttc

SEQ ID NO: 29151 - DNA, 40 bp, Artificial Sequence
  Description of Artificial Sequence: Synthetic primer
tcatggtcaacttcatcgatggcccctggctcgctgtgtg

SEQ ID NO: 29152 - DNA, 40 bp, Artificial Sequence
  Description of Artificial Sequence: Synthetic primer
cggggtggtggcaatggtcgtggaggccgagggcgaggag

SEQ ID NO: 29153 - DNA, 40 bp, Artificial Sequence
  Description of Artificial Sequence: Synthetic primer
tggctctggtcatcatcttctgcagcaccatcaccctctg

SEQ ID NO: 29154 - DNA, 40 bp, Artificial Sequence
  Description of Artificial Sequence: Synthetic primer
cttttaattcttcagcaatcttctcaaattgtttattttc

SEQ ID NO: 29155 - DNA, 40 bp, Artificial Sequence
  Description of Artificial Sequence: Synthetic primer
gatcatggagaagaagtaaaagaataaatgtgtggtgtcc

SEQ ID NO: 29156 - DNA, 40 bp, Artificial Sequence
  Description of Artificial Sequence: Synthetic primer
tgaagggaatccatatagacgcatttggaaaataagttgc

SEQ ID NO: 29157 - DNA, 40 bp, Artificial Sequence
  Description of Artificial Sequence: Synthetic primer
ggaggatttccagatcgattcccagacttctgcttcacag

SEQ ID NO: 29158 - DNA, 40 bp, Artificial Sequence
  Description of Artificial Sequence: Synthetic primer
tgcaataatcttccaaaatgtccaatacccttgtcatttg

SEQ ID NO: 29159 - DNA, 40 bp, Artificial Sequence
  Description of Artificial Sequence: Synthetic primer
tttggccaagtcgcactccacattagagtttgcctatcag

SEQ ID NO: 29160 - DNA, 40 bp, Artificial Sequence
  Description of Artificial Sequence: Synthetic primer
gctgagctccaattctgctggcaatccccacctgtgtcag

SEQ ID NO: 29161 - DNA, 40 bp, Artificial Sequence
  Description of Artificial Sequence: Synthetic primer
tggagcctgcagagctgcgggctgggtgtggtctccactg

SEQ ID NO: 29162 - DNA, 40 bp, Artificial Sequence
  Description of Artificial Sequence: Synthetic primer
cacagacacacctggctttgccgaagaaaacagaacaaag

SEQ ID NO: 29163 - DNA, 40 bp, Artificial Sequence
  Description of Artificial Sequence: Synthetic primer
ctgtggtccccaggctcagtgtacccagggcttccaggtc

SEQ ID NO: 29164 - DNA, 40 bp, Artificial Sequence
  Description of Artificial Sequence: Synthetic primer
ttcaatgggctgctcgaagccaggactgggtaattctttc

SEQ ID NO: 29165 - DNA, 40 bp, Artificial Sequence
  Description of Artificial Sequence: Synthetic primer
agtattttggggtatattatcctaagggaagataaagatg

SEQ ID NO: 29166 - DNA, 40 bp, Artificial Sequence
  Description of Artificial Sequence: Synthetic primer
gacatgggcaagcccatcacccaccggaaggcctgcaaag

SEQ ID NO: 29167 - DNA, 40 bp, Artificial Sequence
  Description of Artificial Sequence: Synthetic primer
gtgcgagcagcagggactgtgcagcacactgaggaatccg

SEQ ID NO: 29168 - DNA, 40 bp, Artificial Sequence
  Description of Artificial Sequence: Synthetic primer
tctgggctgtggtttctccacgctgcccgaagggggacag

SEQ ID NO: 29169 - DNA, 40 bp, Artificial Sequence
  Description of Artificial Sequence: Synthetic primer
tgcctacagtttccttccttttggggaaagcacacagcag

SEQ ID NO: 29170 - DNA, 40 bp, Artificial Sequence
  Description of Artificial Sequence: Synthetic primer
gtcgagatatctgcctggtcattgtgccatactgggaacc

SEQ ID NO: 29171 - DNA, 40 bp, Artificial Sequence
  Description of Artificial Sequence: Synthetic primer
gctctgcctgaccttagggatcccccaggccaccgacccc

SEQ ID NO: 29172 - DNA, 40 bp, Artificial Sequence
  Description of Artificial Sequence: Synthetic primer
aaccgtggaggccatggcaatcatgggtttcagcgaggag

SEQ ID NO: 29173 - DNA, 40 bp, Artificial Sequence
  Description of Artificial Sequence: Synthetic primer
gacacatggctctccatttgagttgccaccgtaagtctgg

SEQ ID NO: 29174 - DNA, 40 bp, Artificial Sequence
  Description of Artificial Sequence: Synthetic primer
gaggaccacgggccccaggagggccggcaatgccaagagg

SEQ ID NO: 29175 - DNA, 40 bp, Artificial Sequence
  Description of Artificial Sequence: Synthetic primer
tcttcatctacttcctgtttggcacttcccggcacatctc

SEQ ID NO: 29176 - DNA, 40 bp, Artificial Sequence
  Description of Artificial Sequence: Synthetic primer
tgtacaacttatcaacacaaggcagccacaggccaaaatc

SEQ ID NO: 29177 - DNA, 40 bp, Artificial Sequence
  Description of Artificial Sequence: Synthetic primer
tggagacattttacagcaaattatgaccatcacagaccag

SEQ ID NO: 29178 - DNA, 40 bp, Artificial Sequence
  Description of Artificial Sequence: Synthetic primer
agctagagtcacttctgtgggtcttgttatttgcgaggaa

SEQ ID NO: 29179 - DNA, 40 bp, Artificial Sequence
  Description of Artificial Sequence: Synthetic primer
cggatcccgcggccgcggttcggacccgccggcgacatgg

SEQ ID NO: 29180 - DNA, 40 bp, Artificial Sequence
  Description of Artificial Sequence: Synthetic primer
gaagtccctcttcatcatctaactggtccatgggctccac

SEQ ID NO: 29181 - DNA, 40 bp, Artificial Sequence
  Description of Artificial Sequence: Synthetic primer
tctacaagagccctgcttcagatacttacatagtttttgg

SEQ ID NO: 29182 - DNA, 40 bp, Artificial Sequence
  Description of Artificial Sequence: Synthetic primer
aagtgagctattacatcacccagttttgtagggcctttgg

SEQ ID NO: 29183 - DNA, 40 bp, Artificial Sequence
  Description of Artificial Sequence: Synthetic primer
cgtgtgtgggccttggcacaggagaaggcggctgatgtcc

SEQ ID NO: 29184 - DNA, 40 bp, Artificial Sequence
  Description of Artificial Sequence: Synthetic primer
tgccagagaaccttctgcggaagggaaaggagcgctatac

SEQ ID NO: 29185 - DNA, 40 bp, Artificial Sequence
  Description of Artificial Sequence: Synthetic primer
caagctctactcggaaggggaccccggggagaagctggag

SEQ ID NO: 29186 - DNA, 40 bp, Artificial Sequence
  Description of Artificial Sequence: Synthetic primer
ttgccctaggacttttgttcgctctgctgaagttacttgg

SEQ ID NO: 29187 - DNA, 40 bp, Artificial Sequence
  Description of Artificial Sequence: Synthetic primer
agactccaatcccaggaaggcgacggcagcggcggcaaag

SEQ ID NO: 29188 - DNA, 40 bp, Artificial Sequence
  Description of Artificial Sequence: Synthetic primer
gtctcttctacaatcgcggtagaggctgtctccctttttg

SEQ ID NO: 29189 - DNA, 40 bp, Artificial Sequence
  Description of Artificial Sequence: Synthetic primer
cctccacagtgaggttaggtgcggccagatttgcagatgg

SEQ ID NO: 29190 - DNA, 40 bp, Artificial Sequence
  Description of Artificial Sequence: Synthetic primer
aggccccagctggggcctgttgtctgggaccctccctctc

SEQ ID NO: 29191 - DNA, 40 bp, Artificial Sequence
  Description of Artificial Sequence: Synthetic primer
ctattcattctctgctacaagttccaggaggagaccactc

SEQ ID NO: 29192 - DNA, 40 bp, Artificial Sequence
  Description of Artificial Sequence: Synthetic primer
tggaggctggctgcagtggtggcggtggagtcagcagagg

SEQ ID NO: 29193 - DNA, 40 bp, Artificial Sequence
  Description of Artificial Sequence: Synthetic primer
cctcttctccaagtctccttcattgtgctgatggactacc

SEQ ID NO: 29194 - DNA, 40 bp, Artificial Sequence
  Description of Artificial Sequence: Synthetic primer
ccggagataataatgtgtgatgcctacgttactgattttc

SEQ ID NO: 29195 - DNA, 40 bp, Artificial Sequence
  Description of Artificial Sequence: Synthetic primer
atctggggcgtcccctacaaggccgtgcattcggtctttg

SEQ ID NO: 29196 - DNA, 40 bp, Artificial Sequence
  Description of Artificial Sequence: Synthetic primer
aaaatttttatactgggaatgatgctcatataagaatacc

SEQ ID NO: 29197 - DNA, 40 bp, Artificial Sequence
  Description of Artificial Sequence: Synthetic primer
tcatctgtgcagctgtagccctcctggaggtggattgtgg

SEQ ID NO: 29198 - DNA, 40 bp, Artificial Sequence
  Description of Artificial Sequence: Synthetic primer
tgtcttaaatcagtttattaaatctgaattttaaaacatg

SEQ ID NO: 29199 - DNA, 40 bp, Artificial Sequence
  Description of Artificial Sequence: Synthetic primer
tttcactggcaacaacaataatactaagataccaagaatg

SEQ ID NO: 29200 - DNA, 40 bp, Artificial Sequence
  Description of Artificial Sequence: Synthetic primer
cttctctttagctcctggatatgaaaggccatctgcttgg

SEQ ID NO: 29201 - DNA, 40 bp, Artificial Sequence
  Description of Artificial Sequence: Synthetic primer
acaacacctaggcttactttatctaaaatcagagtgtacc

SEQ ID NO: 29202 - DNA, 40 bp, Artificial Sequence
  Description of Artificial Sequence: Synthetic primer
ccccagagagccggctgtctgacatgatggctcagggtgg

SEQ ID NO: 29203 - DNA, 40 bp, Artificial Sequence
  Description of Artificial Sequence: Synthetic primer
aagtctggctttttctccagggtcgtgatctgaagagtcc

SEQ ID NO: 29204 - DNA, 40 bp, Artificial Sequence
  Description of Artificial Sequence: Synthetic primer
tggcagtcttcagatcaagatattgcaagattcttcaaag

SEQ ID NO: 29205 - DNA, 40 bp, Artificial Sequence
  Description of Artificial Sequence: Synthetic primer
caggctgggtctttgtctgtcttcttctacacggcatgtg

SEQ ID NO: 29206 - DNA, 40 bp, Artificial Sequence
  Description of Artificial Sequence: Synthetic primer
tgatgagctcagggtttagtactttctgccatcggtgctg

SEQ ID NO: 29207 - DNA, 40 bp, Artificial Sequence
  Description of Artificial Sequence: Synthetic primer
gagggcttcagtggcagcgtcgcactgggtgcagttgtcg

SEQ ID NO: 29208 - DNA, 40 bp, Artificial Sequence
  Description of Artificial Sequence: Synthetic primer
ggctcaggggcggcaccaggccgctgggtgtgctcacagg

SEQ ID NO: 29209 - DNA, 40 bp, Artificial Sequence
  Description of Artificial Sequence: Synthetic primer
aagaagcctctgcggatcatcaacctgaacttctgtgagc

SEQ ID NO: 29210 - DNA, 40 bp, Artificial Sequence
  Description of Artificial Sequence: Synthetic primer
atttcttctggtaaatgagagcctttcgaaaactttctgc

SEQ ID NO: 29211 - DNA, 40 bp, Artificial Sequence
  Description of Artificial Sequence: Synthetic primer
taacaagaaaaagaagccgaagaaagaagaggaacagaag

SEQ ID NO: 29212 - DNA, 40 bp, Artificial Sequence
  Description of Artificial Sequence: Synthetic primer
attaaggggaactccatgtattttacctacttcagcaatg

SEQ ID NO: 29213 - DNA, 40 bp, Artificial Sequence
  Description of Artificial Sequence: Synthetic primer
tgccattgtttccagtcaatgcaaagtggctagtctgttc

SEQ ID NO: 29214 - DNA, 40 bp, Artificial Sequence
  Description of Artificial Sequence: Synthetic primer
tcaacagtatgagcaagtttatagacattcagagtagaac

SEQ ID NO: 29215 - DNA, 40 bp, Artificial Sequence
  Description of Artificial Sequence: Synthetic primer
atgtttatacaaataaggacactatgcaacaaattatctc

SEQ ID NO: 29216 - DNA, 40 bp, Artificial Sequence
  Description of Artificial Sequence: Synthetic primer
gcttcactccttccctacagcctttcccaggcccactctc

SEQ ID NO: 29217 - DNA, 40 bp, Artificial Sequence
  Description of Artificial Sequence: Synthetic primer
agaacgtggtgggcatgagcaatgccagtgttgccctcac

SEQ ID NO: 29218 - DNA, 40 bp, Artificial Sequence
  Description of Artificial Sequence: Synthetic primer
gggatcactgctgaatgaactgccaaagatgtcatcaaac

SEQ ID NO: 29219 - DNA, 40 bp, Artificial Sequence
  Description of Artificial Sequence: Synthetic primer
gttgctcagcaatgtagctgtggaagcaggaggaacagtg

SEQ ID NO: 29220 - DNA, 40 bp, Artificial Sequence
  Description of Artificial Sequence: Synthetic primer
tattaatgtcactgaaattctaaaaaccaggacattcttc

SEQ ID NO: 29221 - DNA, 40 bp, Artificial Sequence
  Description of Artificial Sequence: Synthetic primer
catggcgatgtttgagcagatgagagccaacgtgggcaag

SEQ ID NO: 29222 - DNA, 40 bp, Artificial Sequence
  Description of Artificial Sequence: Synthetic primer
atgttttaagagattccttctggaagcgctctttgactgc

SEQ ID NO: 29223 - DNA, 40 bp, Artificial Sequence
  Description of Artificial Sequence: Synthetic primer
gtgggctcccacaaaagctgttaccagtgaaggcgaaaaa

SEQ ID NO: 29224 - DNA, 40 bp, Artificial Sequence
  Description of Artificial Sequence: Synthetic primer
caggcgcggcggcgacgggctctcggcgcgcaggcggtcg

SEQ ID NO: 29225 - DNA, 40 bp, Artificial Sequence
  Description of Artificial Sequence: Synthetic primer
gctcttcggaaagaactgcaggacactcagctcaaactgg

SEQ ID NO: 29226 - DNA, 40 bp, Artificial Sequence
  Description of Artificial Sequence: Synthetic primer
tctccttcttggtatcttctgttttaattttcttaggttt

SEQ ID NO: 29227 - DNA, 40 bp, Artificial Sequence
  Description of Artificial Sequence: Synthetic primer
gacctcagcgatggcgagaaggaggcacgttttctagcag

SEQ ID NO: 29228 - DNA, 40 bp, Artificial Sequence
  Description of Artificial Sequence: Synthetic primer
gttacactcgccaacatctcggggcagttggacctatctc

SEQ ID NO: 29229 - DNA, 40 bp, Artificial Sequence
  Description of Artificial Sequence: Synthetic primer
attaaaataaatttggacagctttggtttgggaggcgttg

SEQ ID NO: 29230 - DNA, 40 bp, Artificial Sequence
  Description of Artificial Sequence: Synthetic primer
aaaagtgctggatttgtacttcaattgtacatcttctatg

SEQ ID NO: 29231 - DNA, 40 bp, Artificial Sequence
  Description of Artificial Sequence: Synthetic primer
tcggaccatcttgggctataagaccttggccgtgggactc

SEQ ID NO: 29232 - DNA, 40 bp, Artificial Sequence
  Description of Artificial Sequence: Synthetic primer
caaaccttggatttaccagactgtcttttcactgtttgtg

SEQ ID NO: 29233 - DNA, 40 bp, Artificial Sequence
  Description of Artificial Sequence: Synthetic primer
gtgctcctacacacgaaatgaagcccaaatcaaacatcac

SEQ ID NO: 29234 - DNA, 40 bp, Artificial Sequence
  Description of Artificial Sequence: Synthetic primer
cagtaaagtcacgctggagtggttctcagcaggttgaaca

SEQ ID NO: 29235 - DNA, 40 bp, Artificial Sequence
  Description of Artificial Sequence: Synthetic primer
cgaggtcgtcccctccgccggccgccccggcgctggagcc

SEQ ID NO: 29236 - DNA, 40 bp, Artificial Sequence
  Description of Artificial Sequence: Synthetic primer
tgactctgcagcgtcgtagcaaggacatggctcctgtgag

SEQ ID NO: 29237 - DNA, 40 bp, Artificial Sequence
  Description of Artificial Sequence: Synthetic primer
gcacaagacctaactcaaaggaggaaaataatacattacc

SEQ ID NO: 29238 - DNA, 40 bp, Artificial Sequence
  Description of Artificial Sequence: Synthetic primer
cttctgaatgacagagttttatcttgaggctctccacttc

SEQ ID NO: 29239 - DNA, 40 bp, Artificial Sequence
  Description of Artificial Sequence: Synthetic primer
tgtgcatgggcagacacattttgcctctatgtctcttaaa

SEQ ID NO: 29240 - DNA, 40 bp, Artificial Sequence
  Description of Artificial Sequence: Synthetic primer
ctctttgccctcttcaggatatggaactaacactcctagc

SEQ ID NO: 29241 - DNA, 40 bp, Artificial Sequence
  Description of Artificial Sequence: Synthetic primer
taatgaagtcagactccaagtgaaggggctcaatcaagac

SEQ ID NO: 29242 - DNA, 40 bp, Artificial Sequence
  Description of Artificial Sequence: Synthetic primer
tttttagtacattttattttttcataaaattgctaatgcc

SEQ ID NO: 29243 - DNA, 40 bp, Artificial Sequence
  Description of Artificial Sequence: Synthetic primer
ttcttgaaagaagctgcagtcatgaaagagatcaaacacc

SEQ ID NO: 29244 - DNA, 40 bp, Artificial Sequence
  Description of Artificial Sequence: Synthetic primer
tgaagggcctctgtatgtaagcttgggacagctagtgcag

SEQ ID NO: 29245 - DNA, 40 bp, Artificial Sequence
  Description of Artificial Sequence: Synthetic primer
tgatttctgaaatcaaacacccatgcttgtcccctaggaa

SEQ ID NO: 29246 - DNA, 40 bp, Artificial Sequence
  Description of Artificial Sequence: Synthetic primer
attttaggtctccattttgagatgttttgatttatagaag

SEQ ID NO: 29247 - DNA, 40 bp, Artificial Sequence
  Description of Artificial Sequence: Synthetic primer
atgaatccacttcttccgctcagatctctgacctcccaca

SEQ ID NO: 29248 - DNA, 40 bp, Artificial Sequence
  Description of Artificial Sequence: Synthetic primer
aaggggcccaagccccatctcatcctggcacgccctactc

SEQ ID NO: 29249 - DNA, 40 bp, Artificial Sequence
  Description of Artificial Sequence: Synthetic primer
tgcacataatttaaaaagaggtaattttttagccttcttt

SEQ ID NO: 29250 - DNA, 40 bp, Artificial Sequence
  Description of Artificial Sequence: Synthetic primer
cgctgaaaacatctgacacttcctgagtcatggcctcctg

SEQ ID NO: 29251 - DNA, 40 bp, Artificial Sequence
  Description of Artificial Sequence: Synthetic primer
tgcacagcccattaatacatcatattggttggtctcgaag

SEQ ID NO: 29252 - DNA, 40 bp, Artificial Sequence
  Description of Artificial Sequence: Synthetic primer
aggaaatagccattaaaaagttgctctaactttagatttc

SEQ ID NO: 29253 - DNA, 40 bp, Artificial Sequence
  Description of Artificial Sequence: Synthetic primer
atctgtggtaggaagcaagcaggtttaagtacaagaaaac

SEQ ID NO: 29254 - DNA, 40 bp, Artificial Sequence
  Description of Artificial Sequence: Synthetic primer
tgaagacatgaatggtgctttctctgggcttgacaaactg

SEQ ID NO: 29255 - DNA, 40 bp, Artificial Sequence
  Description of Artificial Sequence: Synthetic primer
ggagggcgtgtggccagcggcaaccaagagggtgggaaag

SEQ ID NO: 29256 - DNA, 40 bp, Artificial Sequence
  Description of Artificial Sequence: Synthetic primer
caaacagtctagtgtaatggatcaaattaagattctctgc

SEQ ID NO: 29257 - DNA, 40 bp, Artificial Sequence
  Description of Artificial Sequence: Synthetic primer
atggtcgcacacacctgtgctcactcaaaaggccatgcac

SEQ ID NO: 29258 - DNA, 40 bp, Artificial Sequence
  Description of Artificial Sequence: Synthetic primer
cagaacatttttctcaaatcatgggcggatcttggaggtc

SEQ ID NO: 29259 - DNA, 40 bp, Artificial Sequence
  Description of Artificial Sequence: Synthetic primer
tttaacaccagaaagaaccttgccgatcaccaggcataac

SEQ ID NO: 29260 - DNA, 40 bp, Artificial Sequence
  Description of Artificial Sequence: Synthetic primer
ttgatgtccataaagagatgttcatagttccagtcgtgtc

SEQ ID NO: 29261 - DNA, 40 bp, Artificial Sequence
  Description of Artificial Sequence: Synthetic primer
gatagtaaaactgcttttgtgaccgaggtcaactcgttta

SEQ ID NO: 29262 - DNA, 40 bp, Artificial Sequence
  Description of Artificial Sequence: Synthetic primer
tgtgggcccggtcgtaatgagtaaacattttatttccaag

SEQ ID NO: 29263 - DNA, 40 bp, Artificial Sequence
  Description of Artificial Sequence: Synthetic primer
tggcaaggcagccctgtctgaaggacacttcctgcctaag

SEQ ID NO: 29264 - DNA, 40 bp, Artificial Sequence
  Description of Artificial Sequence: Synthetic primer
gtcgcaagtgctgagcgtgggccttgggtgtgtctcatgg

SEQ ID NO: 29265 - DNA, 40 bp, Artificial Sequence
  Description of Artificial Sequence: Synthetic primer
ccctcttcctctcttcctccagggactctggggccctttg

SEQ ID NO: 29266 - DNA, 40 bp, Artificial Sequence
  Description of Artificial Sequence: Synthetic primer
tggcaggagaaaggggcaaggaagccagctctgaggaagc

SEQ ID NO: 29267 - DNA, 40 bp, Artificial Sequence
  Description of Artificial Sequence: Synthetic primer
accaaagttatcttcaggtgcgtcataaaagctggcctac

SEQ ID NO: 29268 - DNA, 40 bp, Artificial Sequence
  Description of Artificial Sequence: Synthetic primer
gtccatgggagccggagcgccgggacgccaagcacttcct

SEQ ID NO: 29269 - DNA, 40 bp, Artificial Sequence
  Description of Artificial Sequence: Synthetic primer
ggcaacccgccgccgccgccgccctcggagctgaagaaag

SEQ ID NO: 29270 - DNA, 40 bp, Artificial Sequence
  Description of Artificial Sequence: Synthetic primer
accaagaccatatcatttagaattcattggcatgtagagg

SEQ ID NO: 29271 - DNA, 40 bp, Artificial Sequence
  Description of Artificial Sequence: Synthetic primer
ctctcggaagtgcggactatcgaggcagcagtcgctgaac

SEQ ID NO: 29272 - DNA, 40 bp, Artificial Sequence
  Description of Artificial Sequence: Synthetic primer
gttacttcactgcctttattttgtccttattttctctctg

SEQ ID NO: 29273 - DNA, 40 bp, Artificial Sequence
  Description of Artificial Sequence: Synthetic primer
tctcgtccttttcctttttgatcttgtgttggttgatttt

SEQ ID NO: 29274 - DNA, 40 bp, Artificial Sequence
  Description of Artificial Sequence: Synthetic primer
tgtgccccctctccccttcccagggcggccaacaatactc

SEQ ID NO: 29275 - DNA, 40 bp, Artificial Sequence
  Description of Artificial Sequence: Synthetic primer
ttgcagaagaaacttcagcaagctagaactggaaggtact

SEQ ID NO: 29276 - DNA, 40 bp, Artificial Sequence
  Description of Artificial Sequence: Synthetic primer
gatgctggggctgctccagtaacaatcatccgcacacacc

SEQ ID NO: 29277 - DNA, 40 bp, Artificial Sequence
  Description of Artificial Sequence: Synthetic primer
ctgactgttcttgcaacaatagcaggtgaaggatgcctgt

SEQ ID NO: 29278 - DNA, 40 bp, Artificial Sequence
  Description of Artificial Sequence: Synthetic primer
ggcgttcccgaaggcctccaggatggggttggcctgcagc

SEQ ID NO: 29279 - DNA, 40 bp, Artificial Sequence
  Description of Artificial Sequence: Synthetic primer
acccagaagctgaacaagagtcccaaggagaccttccatc

SEQ ID NO: 29280 - DNA, 40 bp, Artificial Sequence
  Description of Artificial Sequence: Synthetic primer
atctaccccgagcagttctcctacatgcgggagctcaaac

SEQ ID NO: 29281 - DNA, 40 bp, Artificial Sequence
  Description of Artificial Sequence: Synthetic primer
gggtgacgtgagcagcaaggataagatgggcaaaggagtg

SEQ ID NO: 29282 - DNA, 40 bp, Artificial Sequence
  Description of Artificial Sequence: Synthetic primer
gctgaggaacacgaaccccaactttgtccgctgcatcatc

SEQ ID NO: 29283 - DNA, 40 bp, Artificial Sequence
  Description of Artificial Sequence: Synthetic primer
ctggacatcaagaaggttagtgtagagaccacatccaaag

SEQ ID NO: 29284 - DNA, 40 bp, Artificial Sequence
  Description of Artificial Sequence: Synthetic primer
tctaaggaagcactgacatacggctctgaaaattggaatc

SEQ ID NO: 29285 - DNA, 40 bp, Artificial Sequence
  Description of Artificial Sequence: Synthetic primer
tgagtcctttttcagtcctgaggatgccagagaagaagca

SEQ ID NO: 29286 - DNA, 40 bp, Artificial Sequence
  Description of Artificial Sequence: Synthetic primer
ctgctgagctttctgcatggccaccggtgaggatccttgt

SEQ ID NO: 29287 - DNA, 40 bp, Artificial Sequence
  Description of Artificial Sequence: Synthetic primer
acctctcgggagacaacgctccacgggagacccacccatc

SEQ ID NO: 29288 - DNA, 40 bp, Artificial Sequence
  Description of Artificial Sequence: Synthetic primer
agatttgcgaagagcagcagcatggatggattttatgacc

SEQ ID NO: 29289 - DNA, 40 bp, Artificial Sequence
  Description of Artificial Sequence: Synthetic primer
ttcaatgtagtcgtcgtcgccgccggccggcgcgggcacc

SEQ ID NO: 29290 - DNA, 40 bp, Artificial Sequence
  Description of Artificial Sequence: Synthetic primer
gcctacaaaataaacacttctctccccatttgtgcgtgac

SEQ ID NO: 29291 - DNA, 40 bp, Artificial Sequence
  Description of Artificial Sequence: Synthetic primer
ccaggcagagatatacactctgcacaaaggaatgaacagt

SEQ ID NO: 29292 - DNA, 40 bp, Artificial Sequence
  Description of Artificial Sequence: Synthetic primer
tacaatgtattttcggccaggaagcaggtcagggatgttc

SEQ ID NO: 29293 - DNA, 40 bp, Artificial Sequence
  Description of Artificial Sequence: Synthetic primer
cccaccagcggacagggcagctatgcctcctctgccatcg

SEQ ID NO: 29294 - DNA, 40 bp, Artificial Sequence
  Description of Artificial Sequence: Synthetic primer
cctgcacctacctctgtgttggatgggccccctgcacctg

SEQ ID NO: 29295 - DNA, 40 bp, Artificial Sequence
  Description of Artificial Sequence: Synthetic primer
ggggtgggtatccgggcagcgtgggccccaccatctctcg

SEQ ID NO: 29296 - DNA, 40 bp, Artificial Sequence
  Description of Artificial Sequence: Synthetic primer
gctgattcaggtccctctggatccgcaattcatcctggag

SEQ ID NO: 29297 - DNA, 40 bp, Artificial Sequence
  Description of Artificial Sequence: Synthetic primer
aaacacagactacttgagacagagggctttatatgcattg

SEQ ID NO: 29298 - DNA, 40 bp, Artificial Sequence
  Description of Artificial Sequence: Synthetic primer
acaccagtttgcatggcctttccagcagcctgtggatgcc

SEQ ID NO: 29299 - DNA, 40 bp, Artificial Sequence
  Description of Artificial Sequence: Synthetic primer
atcccagggcttcagcgagcgcatccacagcggcaggaag

SEQ ID NO: 29300 - DNA, 40 bp, Artificial Sequence
  Description of Artificial Sequence: Synthetic primer
gacttggaagactccatgatcggccctgaagttgtccatc

SEQ ID NO: 29301 - DNA, 40 bp, Artificial Sequence
  Description of Artificial Sequence: Synthetic primer
acatgacctcaaggacatgttggatgtgaaggagcggaag

SEQ ID NO: 29302 - DNA, 40 bp, Artificial Sequence
  Description of Artificial Sequence: Synthetic primer
aggggaggggcactggatgccacactggggaatggggaag

SEQ ID NO: 29303 - DNA, 40 bp, Artificial Sequence
  Description of Artificial Sequence: Synthetic primer
aggatgtgcccatccaaggggtagcagccttggttatctc

SEQ ID NO: 29304 - DNA, 40 bp, Artificial Sequence
  Description of Artificial Sequence: Synthetic primer
aaaatattccccctcccccgaaggatggcgaggggcagga

SEQ ID NO: 29305 - DNA, 40 bp, Artificial Sequence
  Description of Artificial Sequence: Synthetic primer
ctcccgagggaccacagctggcagctccggggatgccctc

SEQ ID NO: 29306 - DNA, 40 bp, Artificial Sequence
  Description of Artificial Sequence: Synthetic primer
atgtcatagtaaatgacaccaaacttcccaaactgctctg

SEQ ID NO: 29307 - DNA, 40 bp, Artificial Sequence
  Description of Artificial Sequence: Synthetic primer
gtggcgtgctcctgcgatgaccagaacctcaccatgtgtc

SEQ ID NO: 29308 - DNA, 40 bp, Artificial Sequence
  Description of Artificial Sequence: Synthetic primer
cagcaccccattgcaccgcagctgctccagcaccaggaac

SEQ ID NO: 29309 - DNA, 40 bp, Artificial Sequence
  Description of Artificial Sequence: Synthetic primer
actgggtgtccaactacaacgccctgcgggctgctgccgg

SEQ ID NO: 29310 - DNA, 40 bp, Artificial Sequence
  Description of Artificial Sequence: Synthetic primer
atcctcagttcctcttgctgtttatgaatctaagacaagg

SEQ ID NO: 29311 - DNA, 40 bp, Artificial Sequence
  Description of Artificial Sequence: Synthetic primer
tttcataagatgttacacatacatcccattctcccggtaa

SEQ ID NO: 29312 - DNA, 40 bp, Artificial Sequence; identical to SEQ ID NO: 16387
  Description of Artificial Sequence: Synthetic primer

SEQ ID NO: 29313 - DNA, 40 bp, Artificial Sequence
  Description of Artificial Sequence: Synthetic primer
tggctgggcatggatgcaagcgcagcaaagacgtttattt

SEQ ID NO: 29314 - DNA, 40 bp, Artificial Sequence
  Description of Artificial Sequence: Synthetic primer
agctgagcacagaagatgggaacactggtggaggatggaa

SEQ ID NO: 29315 - DNA, 40 bp, Artificial Sequence
  Description of Artificial Sequence: Synthetic primer
gcacaatggtgaactggctggcccggtagtcatccccgta

SEQ ID NO: 29316 - DNA, 40 bp, Artificial Sequence
  Description of Artificial Sequence: Synthetic primer
aacatttcatagctttgttctgtgcaaaattaatgacatc

SEQ ID NO: 29317 - DNA, 40 bp, Artificial Sequence
  Description of Artificial Sequence: Synthetic primer
ggcaaactccagctctgcatccatggtggtcacacgcaca

SEQ ID NO: 29318 - DNA, 40 bp, Artificial Sequence
  Description of Artificial Sequence: Synthetic primer
tccttctccgagcctcttcaaaggcctgttgtgctaatgc

SEQ ID NO: 29319 - DNA, 40 bp, Artificial Sequence
  Description of Artificial Sequence: Synthetic primer
ggggcagccggggctgggggcagacagcacccccaacatc

SEQ ID NO: 29320 - DNA, 40 bp, Artificial Sequence
  Description of Artificial Sequence: Synthetic primer
acagcgctcgatcaggtcccggagagaacatcccctcact

SEQ ID NO: 29321 - DNA, 40 bp, Artificial Sequence
  Description of Artificial Sequence: Synthetic primer
caacaagagctcttggttgcagggatggattatattggaa

SEQ ID NO: 29322 - DNA, 40 bp, Artificial Sequence
  Description of Artificial Sequence: Synthetic primer
gatgtaatctgagggatgaggttgacgcaggctgctaggc

SEQ ID NO: 29323 - DNA, 40 bp, Artificial Sequence
  Description of Artificial Sequence: Synthetic primer
ctgaacctgaccgtgggaggtattcccttccatgagaagg

SEQ ID NO: 29324 - DNA, 40 bp, Artificial Sequence
  Description of Artificial Sequence: Synthetic primer
ccaagtggatgccttcctcgcatggcaacacagccaccac

SEQ ID NO: 29325 - DNA, 40 bp, Artificial Sequence
  Description of Artificial Sequence: Synthetic primer
gcgtccggggtgggcagcggcaggatcgggatggggctct

SEQ ID NO: 29326 - DNA, 40 bp, Artificial Sequence
  Description of Artificial Sequence: Synthetic primer
aaaaaaagtcattccttgtcctccgttttatgagtcagat

SEQ ID NO: 29327 - DNA, 40 bp, Artificial Sequence
  Description of Artificial Sequence: Synthetic primer
gatgtgatgctggagaaggctacaggctgtgttcaatgac

SEQ ID NO: 29328 - DNA, 40 bp, Artificial Sequence
  Description of Artificial Sequence: Synthetic primer
gagatgatggtgagcaccaccagggccaggatggctgaga

SEQ ID NO: 29329 - DNA, 40 bp, Artificial Sequence
  Description of Artificial Sequence: Synthetic primer
atgcagggcgccggggtgctggacgccaacacggcggcgc

SEQ ID NO: 29330 - DNA, 40 bp, Artificial Sequence
  Description of Artificial Sequence: Synthetic primer
ggccagtcggacagcatcatgcatccttccatgaaccaat

SEQ ID NO: 29331 - DNA, 40 bp, Artificial Sequence
  Description of Artificial Sequence: Synthetic primer
cattgcagttggctgaaccttgtgtcaaccatccattcca

SEQ ID NO: 29332 - DNA, 40 bp, Artificial Sequence
  Description of Artificial Sequence: Synthetic primer
gatgcatttcctgattatgctgaagccaatgctgtccaac

SEQ ID NO: 29333 - DNA, 40 bp, Artificial Sequence
  Description of Artificial Sequence: Synthetic primer
gggtggctcccagaacatcctggtgcctctggccaacact

SEQ ID NO: 29334 - DNA, 40 bp, Artificial Sequence
  Description of Artificial Sequence: Synthetic primer
tttcctgcaattacgtgatcctctattgtacatcccgact

SEQ ID NO: 29335 - DNA, 40 bp, Artificial Sequence
  Description of Artificial Sequence: Synthetic primer
atggcagtggacgtggatttggggatggctataatgggta

SEQ ID NO: 29336 - DNA, 40 bp, Artificial Sequence
  Description of Artificial Sequence: Synthetic primer
tgtccatggcttgagtgagttgcacagcttttcgcaggat

SEQ ID NO: 29337 - DNA, 40 bp, Artificial Sequence
  Description of Artificial Sequence: Synthetic primer
ccagctggtgaataagtccgtcagccagggcttctgcttc

SEQ ID NO: 29338 - DNA, 40 bp, Artificial Sequence
  Description of Artificial Sequence: Synthetic primer
cattttttaaggctgctattcgctccttgtactcttcatc

SEQ ID NO: 29339 - DNA, 40 bp, Artificial Sequence
  Description of Artificial Sequence: Synthetic primer
cccggctagaggaaagggatcctgacttgtgctccatcct

SEQ ID NO: 29340 - DNA, 40 bp, Artificial Sequence
  Description of Artificial Sequence: Synthetic primer
tccttgactatttcttaatatccatcctacccatcgttct

SEQ ID NO: 29341 - DNA, 40 bp, Artificial Sequence
  Description of Artificial Sequence: Synthetic primer
ggtggtacttcgcccactgcagcatccagcctggatcgga

SEQ ID NO: 29342 - DNA, 40 bp, Artificial Sequence
  Description of Artificial Sequence: Synthetic primer
atgggagcccaccgttcacctctgctccatgcagctggta

SEQ ID NO: 29343 - DNA, 40 bp, Artificial Sequence
  Description of Artificial Sequence: Synthetic primer
acccagggcggcccctctggcggctctgctcctcccgaag

SEQ ID NO: 29344 - DNA, 40 bp, Artificial Sequence
  Description of Artificial Sequence: Synthetic primer
tttggaggttttctgtcatagtcagcatccaataaggata

SEQ ID NO: 29345 - DNA, 40 bp, Artificial Sequence
  Description of Artificial Sequence: Synthetic primer
cagggaggggtcaggggccagaaaaggccctacatccttg

SEQ ID NO: 29346 - DNA, 40 bp, Artificial Sequence
  Description of Artificial Sequence: Synthetic primer
ttgtcctgataggtgaagccgttgcctacggagcgggatg

SEQ ID NO: 29347 - DNA, 40 bp, Artificial Sequence
  Description of Artificial Sequence: Synthetic primer
cctctctggaacatcagacctgctccttaccttcgatgag

SEQ ID NO: 29348 - DNA, 40 bp, Artificial Sequence
  Description of Artificial Sequence: Synthetic primer
atgaaaataaacccatctggatgcatgctgaagaaagaga

SEQ ID NO: 29349 - DNA, 40 bp, Artificial Sequence
  Description of Artificial Sequence: Synthetic primer
gatgataggaaaccaaggaaatttagggaacagtagcaca

SEQ ID NO: 29350 - DNA, 40 bp, Artificial Sequence
  Description of Artificial Sequence: Synthetic primer
aggccaagggcgctccccaggaagtggcagtcagtcaagt

SEQ ID NO: 29351 - DNA, 40 bp, Artificial Sequence
  Description of Artificial Sequence: Synthetic primer
ccgggtactatggacaccgagccccagatatgaacagatg

SEQ ID NO: 29352 - DNA, 40 bp, Artificial Sequence
  Description of Artificial Sequence: Synthetic primer
aaggctctatgccccaccatcttccctgtggtcccacgac

SEQ ID NO: 29353 - DNA, 40 bp, Artificial Sequence
  Description of Artificial Sequence: Synthetic primer
gatgaaatgttagttatccttaaggagccctgtgtgtggc

SEQ ID NO: 29354 - DNA, 40 bp, Artificial Sequence
  Description of Artificial Sequence: Synthetic primer
cttggagaaacacaggaggaggaggatgagattcttccaa

SEQ ID NO: 29355 - DNA, 40 bp, Artificial Sequence
  Description of Artificial Sequence: Synthetic primer
gggccactgttttgttggcgggcaaccctgcttgcaggat

SEQ ID NO: 29356 - DNA, 40 bp, Artificial Sequence
  Description of Artificial Sequence: Synthetic primer
agaaggagattctccaggtcatcctcagacactttaatct

SEQ ID NO: 29357 - DNA, 40 bp, Artificial Sequence
  Description of Artificial Sequence: Synthetic primer
agcgggcaatctcgacctcctggttcccaccatccttgtt

SEQ ID NO: 29358 - DNA, 40 bp, Artificial Sequence
  Description of Artificial Sequence: Synthetic primer
tccctcggcggcccgggctccgctcatcctgcggcgggcg

SEQ ID NO: 29359 - DNA, 40 bp, Artificial Sequence
  Description of Artificial Sequence: Synthetic primer
ttcttgggcatgtaaaacttaaatgtgagcatcctggtga

SEQ ID NO: 29360 - DNA, 40 bp, Artificial Sequence
  Description of Artificial Sequence: Synthetic primer
gaggcaagaaggcttcctggctcatcccagcagaacagaa

SEQ ID NO: 29361 - DNA, 40 bp, Artificial Sequence
  Description of Artificial Sequence: Synthetic primer
ttcctggagtataagcacttcgtgacccgcaccttcttcc

SEQ ID NO: 29362 - DNA, 40 bp, Artificial Sequence
  Description of Artificial Sequence: Synthetic primer
acgggaagttttatttgcagctcggagcctgtggcggatg

SEQ ID NO: 29363 - DNA, 40 bp, Artificial Sequence
  Description of Artificial Sequence: Synthetic primer
gcagataaatccactagtacaagtgatcctgtgatcgagg

SEQ ID NO: 29364 - DNA, 40 bp, Artificial Sequence
  Description of Artificial Sequence: Synthetic primer
gatgaatttcatgccactggcctccaaaaaacccactgga

SEQ ID NO: 29365 - DNA, 40 bp, Artificial Sequence
  Description of Artificial Sequence: Synthetic primer
ccctggggggagactgggagggtgaggaggatggtgatgc

SEQ ID NO: 29366 - DNA, 40 bp, Artificial Sequence
  Description of Artificial Sequence: Synthetic primer
agagcacaacgaatatcagagaagtgatgcctatggatgt

SEQ ID NO: 29367 - DNA, 40 bp, Artificial Sequence
  Description of Artificial Sequence: Synthetic primer
gtccatgttgatttgatcgacatccttcaggcccttccaa

SEQ ID NO: 29368 - DNA, 40 bp, Artificial Sequence
  Description of Artificial Sequence: Synthetic primer
ccaggctgcacatggcgccaaagcacttgaggagcagcag

SEQ ID NO: 29369 - DNA, 40 bp, Artificial Sequence
  Description of Artificial Sequence: Synthetic primer
tcggaccacagtagcccagtttcatccgtccactcccatc

SEQ ID NO: 29370 - DNA, 40 bp, Artificial Sequence
  Description of Artificial Sequence: Synthetic primer
ccgggcacacgccccatccagccgcatcccgggacccggt

SEQ ID NO: 29371 - DNA, 40 bp, Artificial Sequence
  Description of Artificial Sequence: Synthetic primer
tagagaagccattttccttctccttctttatttttgcatc

SEQ ID NO: 29372 - DNA, 40 bp, Artificial Sequence
  Description of Artificial Sequence: Synthetic primer
gactgggcctctgccccttgtgggtgttgccactgtgctt

SEQ ID NO: 29373 - DNA, 40 bp, Artificial Sequence
  Description of Artificial Sequence: Synthetic primer
gtaactctctggtcctaggtggaggtgtaggggaggttgg

SEQ ID NO: 29374 - DNA, 40 bp, Artificial Sequence
  Description of Artificial Sequence: Synthetic primer
taactgatgacatgcagttcagtgacctcggcggcatcca

SEQ ID NO: 29375 - DNA, 40 bp, Artificial Sequence
  Description of Artificial Sequence: Synthetic primer
tgatgaaaggtgcccgctcgaaccgcaggatgatggagat

SEQ ID NO: 29376 - DNA, 40 bp, Artificial Sequence
  Description of Artificial Sequence: Synthetic primer
ctgagttaaacatgtaacacttcccatattttgtaaacac

SEQ ID NO: 29377 - DNA, 40 bp, Artificial Sequence
  Description of Artificial Sequence: Synthetic primer
ccagctgcttcctcggggaggcccctgcccccaccctgcc

SEQ ID NO: 29378 - DNA, 40 bp, Artificial Sequence
  Description of Artificial Sequence: Synthetic primer
cgagtgccacgggatggacgccgagcaggaaatgcgctga

SEQ ID NO: 29379 - DNA, 40 bp, Artificial Sequence
  Description of Artificial Sequence: Synthetic primer
cctggagggcaagcaccttcatccccaagctatgaaaact

SEQ ID NO: 29380 - DNA, 40 bp, Artificial Sequence
  Description of Artificial Sequence: Synthetic primer
cctcaggatactctgaagaactatgtaccttcttatgacc

SEQ ID NO: 29381 - DNA, 40 bp, Artificial Sequence
  Description of Artificial Sequence: Synthetic primer
ttggggagggcagttcaccagcatccatagagtaataaag

SEQ ID NO: 29382 - DNA, 40 bp, Artificial Sequence
  Description of Artificial Sequence: Synthetic primer
gcccgccttcctgagcggcctggcccagcgcgtgtgcatc

SEQ ID NO: 29383 - DNA, 40 bp, Artificial Sequence
  Description of Artificial Sequence: Synthetic primer
acctgatagagcacagcttcgaagggatgggaggcacctt

SEQ ID NO: 29384 - DNA, 40 bp, Artificial Sequence
  Description of Artificial Sequence: Synthetic primer
gatgtcttactgggtgctagaatgaaaatgtaggtattta

SEQ ID NO: 29385 - DNA, 40 bp, Artificial Sequence
  Description of Artificial Sequence: Synthetic primer
gtaaggtgaagaagcatgaaactcagtctctcgccctgga

SEQ ID NO: 29386 - DNA, 40 bp, Artificial Sequence
  Description of Artificial Sequence: Synthetic primer
tgctgtggggagctgccgtctttctgctgggaggctggat

SEQ ID NO: 29387 - DNA, 40 bp, Artificial Sequence
  Description of Artificial Sequence: Synthetic primer
ttgtgtacagcctcgatggcccggtcaatggcctggagga

SEQ ID NO: 29388 - DNA, 40 bp, Artificial Sequence
  Description of Artificial Sequence: Synthetic primer
cctccgcacgctcctctgccctctccagctcaccctccag

SEQ ID NO: 29389 - DNA, 40 bp, Artificial Sequence
  Description of Artificial Sequence: Synthetic primer
cggaggtcaaatgcatggacagcctggcatcccaccttat

SEQ ID NO: 29390 - DNA, 40 bp, Artificial Sequence
  Description of Artificial Sequence: Synthetic primer
cacacttctggatggcctgtacccgggaggcaccccgtca

SEQ ID NO: 29391 - DNA, 40 bp, Artificial Sequence
  Description of Artificial Sequence: Synthetic primer
ggcaggagtgtcatcttttctcaatggggatgtggcttca

SEQ ID NO: 29392 - DNA, 40 bp, Artificial Sequence
  Description of Artificial Sequence: Synthetic primer
atgtatgttaaatggtggtaatgtagtgggtcaatagaag

SEQ ID NO: 29393 - DNA, 40 bp, Artificial Sequence
  Description of Artificial Sequence: Synthetic primer
gatggcttcatgcagtttcagacacacagtcaggtaggat

SEQ ID NO: 29394 - DNA, 40 bp, Artificial Sequence
  Description of Artificial Sequence: Synthetic primer
gaccacactgccctgttgatcatccctggaggaggccagt

SEQ ID NO: 29395 - DNA, 40 bp, Artificial Sequence
  Description of Artificial Sequence: Synthetic primer
tctccatcaggaatgggacgcaccccgttttcaccgcaag

SEQ ID NO: 29396 - DNA, 40 bp, Artificial Sequence
  Description of Artificial Sequence: Synthetic primer
cacaccccccagcccagactccagccctggaccgcgcatc

SEQ ID NO: 29397 - DNA, 40 bp, Artificial Sequence
  Description of Artificial Sequence: Synthetic primer
ttggggaaaaggtcatccagaggctctttggtagaatcag

SEQ ID NO: 29398 - DNA, 40 bp, Artificial Sequence
  Description of Artificial Sequence: Synthetic primer
ccaggagatgatagaccccctctcaccccaccagcccatc

SEQ ID NO: 29399 - DNA, 40 bp, Artificial Sequence
  Description of Artificial Sequence: Synthetic primer
ccctgctctgttggtggttggggacagctcgcctgcagtg

SEQ ID NO: 29400 - DNA, 40 bp, Artificial Sequence
  Description of Artificial Sequence: Synthetic primer
tccattttcttgtttattttgtgtttaataaaatgttcag

SEQ ID NO: 29401 - DNA, 40 bp, Artificial Sequence
  Description of Artificial Sequence: Synthetic primer
gatggtgattcatcaggaaaataacagagaagattcagat

SEQ ID NO: 29402 - DNA, 40 bp, Artificial Sequence
  Description of Artificial Sequence: Synthetic primer
cttacagttcgaaaccttcctcagtatgtgtccaacgaac

SEQ ID NO: 29403 - DNA, 40 bp, Artificial Sequence
  Description of Artificial Sequence: Synthetic primer
catgcacaatctccatgtaacaaacctttagcagtaggat

SEQ ID NO: 29404 - DNA, 40 bp, Artificial Sequence
  Description of Artificial Sequence: Synthetic primer
gagtggccccaatgggccagtacccctgggcatcctgcaa

SEQ ID NO: 29405 - DNA, 40 bp, Artificial Sequence
  Description of Artificial Sequence: Synthetic primer
gatgtggctgtaacctgctggatgggactccatagctcct

SEQ ID NO: 29406 - DNA, 40 bp, Artificial Sequence
  Description of Artificial Sequence: Synthetic primer
cagggcctcaggaatggcggtggtgtgggggatgtgctaa

SEQ ID NO: 29407 - DNA, 40 bp, Artificial Sequence
  Description of Artificial Sequence: Synthetic primer
caaagcccaaattaacgagtattataaaaggataataaag

SEQ ID NO: 29408 - DNA, 40 bp, Artificial Sequence
  Description of Artificial Sequence: Synthetic primer
atttccacagtgacaggatgactctctgtacaccacattt

SEQ ID NO: 29409 - DNA, 40 bp, Artificial Sequence
  Description of Artificial Sequence: Synthetic primer
tgggggcattctgactcgcgagcgtgccgaaggatgtggt

SEQ ID NO: 29410 - DNA, 40 bp, Artificial Sequence
  Description of Artificial Sequence: Synthetic primer
atcccaatcattgggaagtgcctggatggaatagtaaaag

SEQ ID NO: 29411 - DNA, 40 bp, Artificial Sequence
  Description of Artificial Sequence: Synthetic primer
atccactgatggctcctataagccgtctttcctcactgat

SEQ ID NO: 29412 - DNA, 40 bp, Artificial Sequence
  Description of Artificial Sequence: Synthetic primer
tgaagatgctctccggagccatccactttaaaggcaaaaa

SEQ ID NO: 29413 - DNA, 40 bp, Artificial Sequence
  Description of Artificial Sequence: Synthetic primer
atcctgttacctggagaccctctgagctctcacctgctac

SEQ ID NO: 29414 - DNA, 40 bp, Artificial Sequence
  Description of Artificial Sequence: Synthetic primer
tgacaagactgaggatagtttagaaggatgcttggattgt

SEQ ID NO: 29415 - DNA, 40 bp, Artificial Sequence
  Description of Artificial Sequence: Synthetic primer
tgcactattaaattagaggtttttgaaaaatccaactctc

SEQ ID NO: 29416 - DNA, 40 bp, Artificial Sequence
  Description of Artificial Sequence: Synthetic primer
ccccagtggcacacgaactccttccgctccccgtggatgt

SEQ ID NO: 29417 - DNA, 40 bp, Artificial Sequence
  Description of Artificial Sequence: Synthetic primer
catagctctcctgctcaaataccatcagcatcccatccat

SEQ ID NO: 29418 - DNA, 40 bp, Artificial Sequence
  Description of Artificial Sequence: Synthetic primer
ctcctacggggatgactaccgggccagccagttcaccatt

SEQ ID NO: 29419 - DNA, 40 bp, Artificial Sequence
  Description of Artificial Sequence: Synthetic primer
tgctcggcggccaaggggacagcgcgtgggtggccgagga

SEQ ID NO: 29420 - DNA, 40 bp, Artificial Sequence
  Description of Artificial Sequence: Synthetic primer
acctccagaggtgcagtcttgggcaggatgtagcatgttc

SEQ ID NO: 29421 - DNA, 40 bp, Artificial Sequence
  Description of Artificial Sequence: Synthetic primer
gtgtgggttgaacctctgcccatcctttagtgctgacttt

SEQ ID NO: 29422 - DNA, 40 bp, Artificial Sequence
  Description of Artificial Sequence: Synthetic primer
ggtgggggatgggcctccccaaggctacaggcacggcttc

SEQ ID NO: 29423 - DNA, 40 bp, Artificial Sequence
  Description of Artificial Sequence: Synthetic primer
atccaagtcagcttactctgtctactcagaaactgtagat

SEQ ID NO: 29424 - DNA, 40 bp, Artificial Sequence
  Description of Artificial Sequence: Synthetic primer
gtatcaaatgataagaactgagcacactggatgaaataat

SEQ ID NO: 29425 - DNA, 40 bp, Artificial Sequence
  Description of Artificial Sequence: Synthetic primer
atcccatatccagaaagtaccagttataaagattgctgac

SEQ ID NO: 29426 - DNA, 40 bp, Artificial Sequence
  Description of Artificial Sequence: Synthetic primer
gagcaataacagccagtttgcaaaaggtggaaaatgatac

SEQ ID NO: 29427 - DNA, 40 bp, Artificial Sequence
  Description of Artificial Sequence: Synthetic primer
cgaggagctgctgcagttggaggggaggcttgtggaggag

SEQ ID NO: 29428 - DNA, 40 bp, Artificial Sequence
  Description of Artificial Sequence: Synthetic primer
ccagcttggtcccctcggcccctccgaccttctcactgac

SEQ ID NO: 29429 - DNA, 40 bp, Artificial Sequence
  Description of Artificial Sequence: Synthetic primer
attggcatcagctgaataaccaggggcacatgggggaacg

SEQ ID NO: 29430 - DNA, 40 bp, Artificial Sequence
  Description of Artificial Sequence: Synthetic primer
atgaactgtccccgaggccactcatgttgaaaaacttcac

SEQ ID NO: 29431 - DNA, 40 bp, Artificial Sequence
  Description of Artificial Sequence: Synthetic primer
ctgctcactgagcaacacatcctgatgcttggtggtgtga

SEQ ID NO: 29432 - DNA, 40 bp, Artificial Sequence
  Description of Artificial Sequence: Synthetic primer
cttgacatctataagaagttcctaactaggatgacaagaa

SEQ ID NO: 29433 - DNA, 40 bp, Artificial Sequence
  Description of Artificial Sequence: Synthetic primer
atacctccaactgccccagcccaggcctgtcccggtcatc

SEQ ID NO: 29434 - DNA, 40 bp, Artificial Sequence
  Description of Artificial Sequence: Synthetic primer
gcttccccaagaccctgtttgccacagaggatgccctgga

SEQ ID NO: 29435 - DNA, 40 bp, Artificial Sequence
  Description of Artificial Sequence: Synthetic primer
ggagtggaatcatcaggaatgatagtatctgggatgaact

SEQ ID NO: 29436 - DNA, 40 bp, Artificial Sequence
  Description of Artificial Sequence: Synthetic primer
ctatcagcctcttggcatcctctgtgacatttgctagtat

SEQ ID NO: 29437 - DNA, 40 bp, Artificial Sequence
  Description of Artificial Sequence: Synthetic primer
caatgacagctattttgctattagactgggttggctccag

SEQ ID NO: 29438 - DNA, 40 bp, Artificial Sequence
  Description of Artificial Sequence: Synthetic primer
aattttcagagacccccctcttaccgtgttataacatcca

SEQ ID NO: 29439 - DNA, 40 bp, Artificial Sequence
  Description of Artificial Sequence: Synthetic primer
aagcttgcagccctgtgccttgacaagagcctcatccaca

SEQ ID NO: 29440 - DNA, 40 bp, Artificial Sequence
  Description of Artificial Sequence: Synthetic primer
taaaccactatctatactgcatcctttaaactcaaaatct

SEQ ID NO: 29441 - DNA, 40 bp, Artificial Sequence
  Description of Artificial Sequence: Synthetic primer
aaggagggctccctgcaccagtgtggatgaggtagagttt

SEQ ID NO: 29442 - DNA, 40 bp, Artificial Sequence
  Description of Artificial Sequence: Synthetic primer
cagggatgctcacaccccatgaccctcacccatcgccaca

SEQ ID NO: 29443 - DNA, 40 bp, Artificial Sequence
  Description of Artificial Sequence: Synthetic primer
ggctgtagccgttgagctccctgtgggggcctgtttcatc

SEQ ID NO: 29444 - DNA, 40 bp, Artificial Sequence
  Description of Artificial Sequence: Synthetic primer
tcactatacacagtataacaaaatattcccatccttacct

SEQ ID NO: 29445 - DNA, 40 bp, Artificial Sequence
  Description of Artificial Sequence: Synthetic primer
cgtcggtcggctccatccgtccaccgcacggcctactcaa

SEQ ID NO: 29446 - DNA, 40 bp, Artificial Sequence
  Description of Artificial Sequence: Synthetic primer
cgacacctccttgaatatggcgctgatgtcaactgtagtg

SEQ ID NO: 29447 - DNA, 40 bp, Artificial Sequence
  Description of Artificial Sequence: Synthetic primer
tcgtcccagaagtcagtcttcaccgtctgaatcccaggag

SEQ ID NO: 29448 - DNA, 40 bp, Artificial Sequence
  Description of Artificial Sequence: Synthetic primer
gccccgactcgtcggcactccagccgtatttgctcatcca

SEQ ID NO: 29449 - DNA, 40 bp, Artificial Sequence
  Description of Artificial Sequence: Synthetic primer
cctccccggcaataggtcttagggtaggggctggggcatc

SEQ ID NO: 29450 - DNA, 40 bp, Artificial Sequence
  Description of Artificial Sequence: Synthetic primer
cccgtgcccgtctcccctcggagccacgcgcaccaatctc

SEQ ID NO: 29451 - DNA, 40 bp, Artificial Sequence
  Description of Artificial Sequence: Synthetic primer
ccgcctcccccgtgctcgtcgggctgcgtttggggtgcag

SEQ ID NO: 29452 - DNA, 40 bp, Artificial Sequence
  Description of Artificial Sequence: Synthetic primer
tctggatgtcatccttgttcaccttcaccttcttcccatt

SEQ ID NO: 29453 - DNA, 40 bp, Artificial Sequence
  Description of Artificial Sequence: Synthetic primer
attccctgatataagagaggatggtgttgcaattggctct

SEQ ID NO: 29454 - DNA, 40 bp, Artificial Sequence
  Description of Artificial Sequence: Synthetic primer
gactggtcagaggtgacatgctggcagagaggcgagattc

SEQ ID NO: 29455 - DNA, 40 bp, Artificial Sequence
  Description of Artificial Sequence: Synthetic primer
ttgtcgtcggaggggttgaggtcgaaggtgaagagcttgg

SEQ ID NO: 29456 - DNA, 40 bp, Artificial Sequence
  Description of Artificial Sequence: Synthetic primer
gtcagagggctctcagccttcatccagccgcagcccttta

SEQ ID NO: 29457 - DNA, 40 bp, Artificial Sequence
  Description of Artificial Sequence: Synthetic primer
ggaggatttgaagtggtcatcctcgtagttgtcggccatt

SEQ ID NO: 29458 - DNA, 40 bp, Artificial Sequence
  Description of Artificial Sequence: Synthetic primer
aggtgggacaccaccatgtccggcagagcttgggtccatc

SEQ ID NO: 29459 - DNA, 40 bp, Artificial Sequence
  Description of Artificial Sequence: Synthetic primer
acatatgtttaacatccattgaatgcaacgttttattttt

SEQ ID NO: 29460 - DNA, 40 bp, Artificial Sequence
  Description of Artificial Sequence: Synthetic primer
gatgtcctattttcttttcttttccatagccatccatcta

SEQ ID NO: 29461 - DNA, 40 bp, Artificial Sequence
  Description of Artificial Sequence: Synthetic primer
tccagcctcccagcagaaagacggcagctccccacagcag

SEQ ID NO: 29462 - DNA, 40 bp, Artificial Sequence
  Description of Artificial Sequence: Synthetic primer
ttctggtctcgaagagtggagtgactggagccctgtgaag

SEQ ID NO: 29463 - DNA, 40 bp, Artificial Sequence
  Description of Artificial Sequence: Synthetic primer
gctcaacaatatcatctctcggaccacggatggcgtctat

SEQ ID NO: 29464 - DNA, 40 bp, Artificial Sequence
  Description of Artificial Sequence: Synthetic primer
gagatcttccgcagctgctccaggatgatggtcttgtctt

SEQ ID NO: 29465 - DNA, 40 bp, Artificial Sequence
  Description of Artificial Sequence: Synthetic primer
gccctggtggtgctcaccatcatctcccttatcatcctca

SEQ ID NO: 29466 - DNA, 40 bp, Artificial Sequence
  Description of Artificial Sequence: Synthetic primer
ccgtgatggccgaaccagaagaaccccagagttcatggat

SEQ ID NO: 29467 - DNA, 40 bp, Artificial Sequence
  Description of Artificial Sequence: Synthetic primer
ctccggaacgataactccagcaggttcgggaagtacatgg

SEQ ID NO: 29468 - DNA, 40 bp, Artificial Sequence
  Description of Artificial Sequence: Synthetic primer
tggcagccgccgcatgtcagcagggatggggggatctgca

SEQ ID NO: 29469 - DNA, 40 bp, Artificial Sequence
  Description of Artificial Sequence: Synthetic primer
aaatcaaatcacagtcatcttcatcttcatcctcccacaa

SEQ ID NO: 29470 - DNA, 40 bp, Artificial Sequence
  Description of Artificial Sequence: Synthetic primer
ctccagaaattcaaccatgagcagcatgaatattaccata

SEQ ID NO: 29471 - DNA, 40 bp, Artificial Sequence
  Description of Artificial Sequence: Synthetic primer
gggctcagagaccacactgctcatcctgttggaagcctta

SEQ ID NO: 29472 - DNA, 40 bp, Artificial Sequence
  Description of Artificial Sequence: Synthetic primer
cccacgtcccgtccgcgtagcagccatctggcatccttat

SEQ ID NO: 29473 - DNA, 40 bp, Artificial Sequence
  Description of Artificial Sequence: Synthetic primer
tcattctttgctcaagaaaggcctgaatgacaatgtccag

SEQ ID NO: 29474 - DNA, 40 bp, Artificial Sequence
  Description of Artificial Sequence: Synthetic primer
gatgaagaagcgcggccttcacacatcccagccggtgact

SEQ ID NO: 29475 - DNA, 40 bp, Artificial Sequence
  Description of Artificial Sequence: Synthetic primer
ccgagcccgaccccacgggggccactcctaggtggatgtt

SEQ ID NO: 29476 - DNA, 40 bp, Artificial Sequence
  Description of Artificial Sequence: Synthetic primer
ctgcggggaggggacgaagccgcggatgaacggagacaaa

SEQ ID NO: 29477 - DNA, 40 bp, Artificial Sequence
  Description of Artificial Sequence: Synthetic primer
gtggggtgggctgatgcccctttgcagctgggcaggatgt

SEQ ID NO: 29478 - DNA, 40 bp, Artificial Sequence
  Description of Artificial Sequence: Synthetic primer
ctccggcccgcgctcctccacatccacaaacagggtcctc

SEQ ID NO: 29479 - DNA, 40 bp, Artificial Sequence
  Description of Artificial Sequence: Synthetic primer
ttcgagaacacgcccgagatcgccatccgctccctggaca

SEQ ID NO: 29480 - DNA, 40 bp, Artificial Sequence
  Description of Artificial Sequence: Synthetic primer
aggaattgacaatggccatgtcctacgtgaaggatgacat

SEQ ID NO: 29481 - DNA, 40 bp, Artificial Sequence
  Description of Artificial Sequence: Synthetic primer
tccatggcagtgcatcctgtaccttccccaactacgtttt

SEQ ID NO: 29482 - DNA, 40 bp, Artificial Sequence
  Description of Artificial Sequence: Synthetic primer
ggaggcgtctgtccatccgtcacatccatcattgcagagt

SEQ ID NO: 29483 - DNA, 40 bp, Artificial Sequence
  Description of Artificial Sequence: Synthetic primer
tttttcttttctttttgttctcccaacatccttatctctt

SEQ ID NO: 29484 - DNA, 40 bp, Artificial Sequence
  Description of Artificial Sequence: Synthetic primer
atctcaagccaatcgatatgtgggactaagcccaagagac

SEQ ID NO: 29485 - DNA, 40 bp, Artificial Sequence
  Description of Artificial Sequence: Synthetic primer
atcccgggctgcccggtggtactggtcgttcatggcgccc

SEQ ID NO: 29486 - DNA, 40 bp, Artificial Sequence
  Description of Artificial Sequence: Synthetic primer
cactatatccaaactatgcaagaaagagtccatccagaag

SEQ ID NO: 29487 - DNA, 40 bp, Artificial Sequence
  Description of Artificial Sequence: Synthetic primer
tatgggtgtgctgcattgcaacgtccctgaacaccataac

SEQ ID NO: 29488 - DNA, 40 bp, Artificial Sequence
  Description of Artificial Sequence: Synthetic primer
gggggaggatgccgccgctgttcccacctccacggccact

SEQ ID NO: 29489 - DNA, 40 bp, Artificial Sequence
  Description of Artificial Sequence: Synthetic primer
gcttgccatcacagcacgcctatcggatgtgagaggagaa

SEQ ID NO: 29490 - DNA, 40 bp, Artificial Sequence
  Description of Artificial Sequence: Synthetic primer
atggcaatgacccttcccaggaactgccagaggtccaaac

SEQ ID NO: 29491 - DNA, 40 bp, Artificial Sequence
  Description of Artificial Sequence: Synthetic primer
gatgcctccccctgtggagccccctactggagatggagca

SEQ ID NO: 29492 - DNA, 40 bp, Artificial Sequence
  Description of Artificial Sequence: Synthetic primer
accccgcaacaccgcctgagccgtgaccctctataagcat

SEQ ID NO: 29493 - DNA, 40 bp, Artificial Sequence
  Description of Artificial Sequence: Synthetic primer
gtgatcatgttttggatgatacctgagcagggttgccttt

SEQ ID NO: 29494 - DNA, 40 bp, Artificial Sequence
  Description of Artificial Sequence: Synthetic primer
cagcagcggacactgtgttcagaactttcctccatcccta

SEQ ID NO: 29495 - DNA, 40 bp, Artificial Sequence
  Description of Artificial Sequence: Synthetic primer
ttccagaagcttcttaatggattcatcccgagcatttagg

SEQ ID NO: 29496 - DNA, 40 bp, Artificial Sequence
  Description of Artificial Sequence: Synthetic primer
gcatggccaccccgctgctgatgcaggcgctgcccatggg

SEQ ID NO: 29497 - DNA, 40 bp, Artificial Sequence
  Description of Artificial Sequence: Synthetic primer
tggggtgagtcatccctactcccaacatctggaggggaaa

SEQ ID NO: 29498 - DNA, 40 bp, Artificial Sequence
  Description of Artificial Sequence: Synthetic primer
atccgtccatctgctcagaccctacagaagagccaactgc

SEQ ID NO: 29499 - DNA, 40 bp, Artificial Sequence
  Description of Artificial Sequence: Synthetic primer
ttgctgtgatgatccagtatataagatctccatccacagt

SEQ ID NO: 29500 - DNA, 40 bp, Artificial Sequence
  Description of Artificial Sequence: Synthetic primer
aatgagtttattatcttctccacgacctcacctatacatc

SEQ ID NO: 29501 - DNA, 40 bp, Artificial Sequence
  Description of Artificial Sequence: Synthetic primer
tgtgggactcccaagggaaaccggcctgtcatcctcacct

SEQ ID NO: 29502 - DNA, 40 bp, Artificial Sequence
  Description of Artificial Sequence: Synthetic primer
tgatctgactcataaaacggaggacaaggaatgacttttt

SEQ ID NO: 29503 - DNA, 40 bp, Artificial Sequence
  Description of Artificial Sequence: Synthetic primer
gagaccccacggagctggcgggagaggggttgggagacat

SEQ ID NO: 29504 - DNA, 40 bp, Artificial Sequence
  Description of Artificial Sequence: Synthetic primer
atccaatgatgatgactagagcagggtggtcacactcttg

SEQ ID NO: 29505 - DNA, 40 bp, Artificial Sequence
  Description of Artificial Sequence: Synthetic primer
tcggcctcacggtggaagtccttgcgtgcattgtcactgg

SEQ ID NO: 29506 - DNA, 40 bp, Artificial Sequence
  Description of Artificial Sequence: Synthetic primer
cttttttaattgcttcttctgaagcatccaacagagattt

SEQ ID NO: 29507 - DNA, 40 bp, Artificial Sequence
  Description of Artificial Sequence: Synthetic primer
gtagctgtctccagacagtgggatgtgctacattgtctat

SEQ ID NO: 29508 - DNA, 40 bp, Artificial Sequence
  Description of Artificial Sequence: Synthetic primer
gcagagagccgtgcgccaagcgtgggcccgcgagcagcag

SEQ ID NO: 29509 - DNA, 40 bp, Artificial Sequence
  Description of Artificial Sequence: Synthetic primer
gagtgaatggagcaatggggctaaggtcattgggggatgt

SEQ ID NO: 29510 - DNA, 40 bp, Artificial Sequence
  Description of Artificial Sequence: Synthetic primer
tatcgaatggaacagcctgagggatgcccccctaaggttt

SEQ ID NO: 29511 - DNA, 40 bp, Artificial Sequence
  Description of Artificial Sequence: Synthetic primer
ttccagccccagagatttcaggcatttcaccaccctagat

SEQ ID NO: 29512 - DNA, 40 bp, Artificial Sequence
  Description of Artificial Sequence: Synthetic primer
tctgacaacgaacttgtatgagggtcatattgaaaaggat

SEQ ID NO: 29513 - DNA, 40 bp, Artificial Sequence
  Description of Artificial Sequence: Synthetic primer
tcttttttcttcctcgaccatcaggtgcgccatccatttt

SEQ ID NO: 29514 - DNA, 40 bp, Artificial Sequence
  Description of Artificial Sequence: Synthetic primer
tgtgcaccaccatgtgtctccggacatcctttcgggtgta

SEQ ID NO: 29515 - DNA, 40 bp, Artificial Sequence
  Description of Artificial Sequence: Synthetic primer
acgttgctgtgtaggccaagcaccagtgcgccttcattag

SEQ ID NO: 29516 - DNA, 40 bp, Artificial Sequence
  Description of Artificial Sequence: Synthetic primer
cacattccaatccttggttataggcattcttcatcacatc

SEQ ID NO: 29517 - DNA, 40 bp, Artificial Sequence
  Description of Artificial Sequence: Synthetic primer
catggagaagaccatggccaggatgagggcagagtaacag

SEQ ID NO: 29518 - DNA, 40 bp, Artificial Sequence
  Description of Artificial Sequence: Synthetic primer
gaactcttcgacaggcaagtcttcaacaggtgggaaatgg

SEQ ID NO: 29519 - DNA, 40 bp, Artificial Sequence
  Description of Artificial Sequence: Synthetic primer
ctgctctgggggccggatcacaggcctcccgacatccaca

SEQ ID NO: 29520 - DNA, 40 bp, Artificial Sequence
  Description of Artificial Sequence: Synthetic primer
agcagatgcgcatccagtcgctggagaagacagtggagca

SEQ ID NO: 29521 - DNA, 40 bp, Artificial Sequence
  Description of Artificial Sequence: Synthetic primer
cgagcaggagagagaccagctggaaatagttgccatggat

SEQ ID NO: 29522 - DNA, 40 bp, Artificial Sequence
  Description of Artificial Sequence: Synthetic primer
cctttctctgtcttttcctttatttcagctacccatccag

SEQ ID NO: 29523 - DNA, 40 bp, Artificial Sequence
  Description of Artificial Sequence: Synthetic primer
tgcattcttctctttcttcagcatgcatccagatgggttt

SEQ ID NO: 29524 - DNA, 40 bp, Artificial Sequence
  Description of Artificial Sequence: Synthetic primer
ttgtgattcaggaagaaacccaaggttggagggtgggatg

SEQ ID NO: 29525 - DNA, 40 bp, Artificial Sequence
  Description of Artificial Sequence: Synthetic primer
ccaggacggagacctcaccctgtaccagtccaataccatc

SEQ ID NO: 29526 - DNA, 40 bp, Artificial Sequence
  Description of Artificial Sequence: Synthetic primer
ccgtttgcgctgctcgccagcccgggtgaggatgctggat

SEQ ID NO: 29527 - DNA, 40 bp, Artificial Sequence
  Description of Artificial Sequence: Synthetic primer
caagagaggcatcctccttgaagtatttggctgaggagtt

SEQ ID NO: 29528 - DNA, 40 bp, Artificial Sequence
  Description of Artificial Sequence: Synthetic primer
tgtaatcggtttttgtaatggcgtcagcaaataaaaggat

SEQ ID NO: 29529 - DNA, 40 bp, Artificial Sequence
  Description of Artificial Sequence: Synthetic primer
aagctgcagcatcagcggctcattctccaagtagccatgc

SEQ ID NO: 29530 - DNA, 40 bp, Artificial Sequence
  Description of Artificial Sequence: Synthetic primer
atcctaggtactgaaactgttgcaccatcagataaccttc

SEQ ID NO: 29531 - DNA, 40 bp, Artificial Sequence
  Description of Artificial Sequence: Synthetic primer
agaatcacaagaaaatgtgctttggagggccaggggaagc

SEQ ID NO: 29532 - DNA, 40 bp, Artificial Sequence
  Description of Artificial Sequence: Synthetic primer
tttgaggcttgtctaaggaaaaaaataaaaggcagtgaag

SEQ ID NO: 29533 - DNA, 40 bp, Artificial Sequence
  Description of Artificial Sequence: Synthetic primer
cctcatcctggacctgggtgccctctcctttgtggacact

SEQ ID NO: 29534 - DNA, 40 bp, Artificial Sequence
  Description of Artificial Sequence: Synthetic primer
ctggtagaaacattgccaatctcatcccggtaataaacat

SEQ ID NO: 29535 - DNA, 40 bp, Artificial Sequence
  Description of Artificial Sequence: Synthetic primer
ccttgggacctgtcctttccgtccctgtccctttggcttc

SEQ ID NO: 29536 - DNA, 40 bp, Artificial Sequence
  Description of Artificial Sequence: Synthetic primer
tacagctcaacaggcaaaatacgagctctatggccagaat

SEQ ID NO: 29537 - DNA, 40 bp, Artificial Sequence
  Description of Artificial Sequence: Synthetic primer
tgtgtctggatgtgtgtgagggcatggcctacctggaaga

SEQ ID NO: 29538 - DNA, 40 bp, Artificial Sequence
  Description of Artificial Sequence: Synthetic primer
taataataataaccgatcttattcaaacatcccagtaaca

SEQ ID NO: 29539 - DNA, 40 bp, Artificial Sequence
  Description of Artificial Sequence: Synthetic primer
cccacctcagaggagcgcatccccaagaccatcgagatca

SEQ ID NO: 29540 - DNA, 40 bp, Artificial Sequence
  Description of Artificial Sequence: Synthetic primer
atggtgcacgctcgcccatcattgaaaacttccgtgaaaa

SEQ ID NO: 29541 - DNA, 40 bp, Artificial Sequence
  Description of Artificial Sequence: Synthetic primer
gaccttgatgaccagattccgcgccagctcctcaacagag

SEQ ID NO: 29542 - DNA, 40 bp, Artificial Sequence
  Description of Artificial Sequence: Synthetic primer
tgagaaacccaattggaaccaatctgccccactgtccaag

SEQ ID NO: 29543 - DNA, 40 bp, Artificial Sequence
  Description of Artificial Sequence: Synthetic primer
gaggggtcagaggtattttctcccatcccactcatcttga

SEQ ID NO: 29544 - DNA, 40 bp, Artificial Sequence
  Description of Artificial Sequence: Synthetic primer
tcctgaagaccagcagcttctaagagacagcttccaacag

SEQ ID NO: 29545 - DNA, 40 bp, Artificial Sequence
  Description of Artificial Sequence: Synthetic primer
ggaagcagctgccacagaactcacactcgtaggggtggtc

SEQ ID NO: 29546 - DNA, 40 bp, Artificial Sequence
  Description of Artificial Sequence: Synthetic primer
cggtgcccccctccccagctccaggaggcagctgaggggg

SEQ ID NO: 29547 - DNA, 40 bp, Artificial Sequence
  Description of Artificial Sequence: Synthetic primer
ccagggcgggaaggggcctccaccatccgggcccggagct

SEQ ID NO: 29548 - DNA, 40 bp, Artificial Sequence
  Description of Artificial Sequence: Synthetic primer
cagaattaggactttataagagcaaagaacaagaacagtc

SEQ ID NO: 29549 - DNA, 40 bp, Artificial Sequence
  Description of Artificial Sequence: Synthetic primer
tcacgagaggcgcgggtgtcatccagctcgcgcatgcagt

SEQ ID NO: 29550 - DNA, 40 bp, Artificial Sequence
  Description of Artificial Sequence: Synthetic primer
acagttaaaaagctagaaaacggcacaataactcagaatg

SEQ ID NO: 29551 - DNA, 40 bp, Artificial Sequence
  Description of Artificial Sequence: Synthetic primer
atgcagagacctcctgcccagcttgaaacctaccttgctg

SEQ ID NO: 29552 - DNA, 40 bp, Artificial Sequence
  Description of Artificial Sequence: Synthetic primer
accagaaagtagttttgatgaggttgtttagagcggatga

SEQ ID NO: 29553 - DNA, 40 bp, Artificial Sequence
  Description of Artificial Sequence: Synthetic primer
atgcgggcccgtctcgccgcctgctgccgctgttgctgct

SEQ ID NO: 29554 - DNA, 40 bp, Artificial Sequence
  Description of Artificial Sequence: Synthetic primer
tcgtgcttcattttctgaatatttgggggaacatttttgg

SEQ ID NO: 29555 - DNA, 40 bp, Artificial Sequence
  Description of Artificial Sequence: Synthetic primer
ccaggacactgctgcgggagggctccatcctgatgccata

SEQ ID NO: 29556 - DNA, 40 bp, Artificial Sequence
  Description of Artificial Sequence: Synthetic primer
atgctctcggccctgacctgtgggatggctccagtaactt

SEQ ID NO: 29557 - DNA, 40 bp, Artificial Sequence
  Description of Artificial Sequence: Synthetic primer
agcatccaactttcaagtttccccaccctttacacagttt

SEQ ID NO: 29558 - DNA, 40 bp, Artificial Sequence
  Description of Artificial Sequence: Synthetic primer
agtggggggcacttttagggatgtctgtggggaaaccaat

SEQ ID NO: 29559 - DNA, 40 bp, Artificial Sequence
  Description of Artificial Sequence: Synthetic primer
gggcggcttagcccgaaagaaaggcggatggctgcggata

SEQ ID NO: 29560 - DNA, 40 bp, Artificial Sequence
  Description of Artificial Sequence: Synthetic primer
gaaccagtggtcagtatccaggcctctcctggggctcatc

SEQ ID NO: 29561 - DNA, 40 bp, Artificial Sequence
  Description of Artificial Sequence: Synthetic primer
cctcccaggagcctggggatgccaaacatccagaatgtga

SEQ ID NO: 29562 - DNA, 40 bp, Artificial Sequence
  Description of Artificial Sequence: Synthetic primer
tggccacttgcatacaccatgtccatagagaggatggcta

SEQ ID NO: 29563 - DNA, 40 bp, Artificial Sequence
  Description of Artificial Sequence: Synthetic primer
ttacagtattaccgggactatgaactaaaaggtgggactg

SEQ ID NO: 29564 - DNA, 40 bp, Artificial Sequence
  Description of Artificial Sequence: Synthetic primer
tctctgccctgcagagcaactccatccaccgtctgaagaa

SEQ ID NO: 29565 - DNA, 40 bp, Artificial Sequence
  Description of Artificial Sequence: Synthetic primer
catggccacactcttcttcaacccgcaggagtctgccatc

SEQ ID NO: 29566 - DNA, 40 bp, Artificial Sequence
  Description of Artificial Sequence: Synthetic primer
gatgcagccgtatctagaggaggccgtgagggcgtcacat

SEQ ID NO: 29567 - DNA, 40 bp, Artificial Sequence
  Description of Artificial Sequence: Synthetic primer
tgaagtagaattccaaaaacgaaggccacaaaagatcagt

SEQ ID NO: 29568 - DNA, 40 bp, Artificial Sequence
  Description of Artificial Sequence: Synthetic primer
caagtcctggctgaagccacggctgggacaggaagccaca

SEQ ID NO: 29569 - DNA, 40 bp, Artificial Sequence
  Description of Artificial Sequence: Synthetic primer
gctgtacacaacacagccatgcgggatggtggcaagtaca

SEQ ID NO: 29570 - DNA, 40 bp, Artificial Sequence
  Description of Artificial Sequence: Synthetic primer
gtaaggtatattcggaaacctatcgattacacagttctgg

SEQ ID NO: 29571 - DNA, 40 bp, Artificial Sequence
  Description of Artificial Sequence: Synthetic primer
aaggtcgaagatatgaggcggtgaagtggatggtggtgtt

SEQ ID NO: 29572 - DNA, 40 bp, Artificial Sequence
  Description of Artificial Sequence: Synthetic primer
aacttcctctatgccaccgaaatttgggaccaagctgaac

SEQ ID NO: 29573 - DNA, 40 bp, Artificial Sequence
  Description of Artificial Sequence: Synthetic primer
tttggaattcaaattacagttatgtactggatgctacaga

SEQ ID NO: 29574 - DNA, 40 bp, Artificial Sequence
  Description of Artificial Sequence: Synthetic primer
agcttgataatatcaccaacacagacattcatccactgct

SEQ ID NO: 29575 - DNA, 40 bp, Artificial Sequence
  Description of Artificial Sequence: Synthetic primer
cgaggtgggctccaccctctacaccaaggccaacctcatc

SEQ ID NO: 29576 - DNA, 40 bp, Artificial Sequence
  Description of Artificial Sequence: Synthetic primer
agctgaatgtgtatactcaagacatcctgcaaatgggtga

SEQ ID NO: 29577 - DNA, 40 bp, Artificial Sequence
  Description of Artificial Sequence: Synthetic primer
aacaaatagaaaatcttcaagaaacagaaacccaattaag

SEQ ID NO: 29578 - DNA, 40 bp, Artificial Sequence
  Description of Artificial Sequence: Synthetic primer
atcagctacaacaggaagcccctcatcctcgaagaattac

SEQ ID NO: 29579 - DNA, 40 bp, Artificial Sequence
  Description of Artificial Sequence: Synthetic primer
atccctaatggaagaccatggcatagagaaggagaggtga

SEQ ID NO: 29580 - DNA, 40 bp, Artificial Sequence
  Description of Artificial Sequence: Synthetic primer
tgcccacctacttttataaacaccactgcaacttaacaag

SEQ ID NO: 29581 - DNA, 40 bp, Artificial Sequence
  Description of Artificial Sequence: Synthetic primer
tgctaaggctgttgttttccacggcgtggatgagcgggga

SEQ ID NO: 29582 - DNA, 40 bp, Artificial Sequence
  Description of Artificial Sequence: Synthetic primer
tggtgatggccagccatcccttgaaccccctatggctgct

SEQ ID NO: 29583 - DNA, 40 bp, Artificial Sequence
  Description of Artificial Sequence: Synthetic primer
ccttgctctggtactccaggatgcactggatcaggtggtg

SEQ ID NO: 29584 - DNA, 40 bp, Artificial Sequence
  Description of Artificial Sequence: Synthetic primer
gctttggagctttctgttaatagctcttcatcctcctctt

SEQ ID NO: 29585 - DNA, 40 bp, Artificial Sequence
  Description of Artificial Sequence: Synthetic primer
tgttccgcacgccgcgcctgaggaagcgcaccttcatcct

SEQ ID NO: 29586 - DNA, 40 bp, Artificial Sequence
  Description of Artificial Sequence: Synthetic primer
tggaggcccgagtcagcgaaccactgctcagtgccacctc

SEQ ID NO: 29587 - DNA, 40 bp, Artificial Sequence
  Description of Artificial Sequence: Synthetic primer
caataagccttgtcgttgactttagggactcaatttctcc

SEQ ID NO: 29588 - DNA, 40 bp, Artificial Sequence
  Description of Artificial Sequence: Synthetic primer
atccccgaggagaaggatggctggctctatggagaacacg

SEQ ID NO: 29589 - DNA, 40 bp, Artificial Sequence
  Description of Artificial Sequence: Synthetic primer
agcaaaaccatctccccgatggtgatggatgcaaaagctg

SEQ ID NO: 29590 - DNA, 40 bp, Artificial Sequence
  Description of Artificial Sequence: Synthetic primer
tactggaaataaaattcaggatgaggaaaacaaaatgtta

SEQ ID NO: 29591 - DNA, 40 bp, Artificial Sequence
  Description of Artificial Sequence: Synthetic primer
ccgtggtggagaagcgcctagcagcctgcgtcaacctcat

SEQ ID NO: 29592 - DNA, 40 bp, Artificial Sequence
  Description of Artificial Sequence: Synthetic primer
gtgcaaagtccttcgtggatgcaacctcaaccatatattc

SEQ ID NO: 29593 - DNA, 40 bp, Artificial Sequence
  Description of Artificial Sequence: Synthetic primer
ctatttgcatgcaaagaacatcatccatagagacatgaaa

SEQ ID NO: 29594 - DNA, 40 bp, Artificial Sequence
  Description of Artificial Sequence: Synthetic primer
cttgttgcattgtgacctgaagtgaagcaagttcatccaa

SEQ ID NO: 29595 - DNA, 40 bp, Artificial Sequence
  Description of Artificial Sequence: Synthetic primer
tgaagccaaagtcagcaatcttgatgttggcctcggcatc

SEQ ID NO: 29596 - DNA, 40 bp, Artificial Sequence
  Description of Artificial Sequence: Synthetic primer
ccaccaccaagcacgcggtgcgcacggtcccggccatcct

SEQ ID NO: 29597 - DNA, 40 bp, Artificial Sequence
  Description of Artificial Sequence: Synthetic primer
gggaggtaggcgtggtggaggatggggagctggagggaca

SEQ ID NO: 29598 - DNA, 40 bp, Artificial Sequence
  Description of Artificial Sequence: Synthetic primer
ccactttgcttctttgagtttgtatcttggatgccacatt

SEQ ID NO: 29599 - DNA, 40 bp, Artificial Sequence
  Description of Artificial Sequence: Synthetic primer
attctgaaactgtggtggaggaggatgattaaaaaccaaa

SEQ ID NO: 29600 - DNA, 40 bp, Artificial Sequence
  Description of Artificial Sequence: Synthetic primer
gaaccgcttcccgcagagctcgcacccgtacgtcttcatc

SEQ ID NO: 29601 - DNA, 40 bp, Artificial Sequence
  Description of Artificial Sequence: Synthetic primer
gtgcctaactgccagtcatcctacatgagagggggttatt

SEQ ID NO: 29602 - DNA, 40 bp, Artificial Sequence
  Description of Artificial Sequence: Synthetic primer
ttcagttttgactaaggatgacactaattgttagctgttt

SEQ ID NO: 29603 - DNA, 40 bp, Artificial Sequence
  Description of Artificial Sequence: Synthetic primer
gcagctgttggagcccatgacgcctgtcgggatgcaaaag

SEQ ID NO: 29604 - DNA, 40 bp, Artificial Sequence
  Description of Artificial Sequence: Synthetic primer
ctgtggccttcaactcaaatggatgctcttcaactcaaat

SEQ ID NO: 29605 - DNA, 40 bp, Artificial Sequence
  Description of Artificial Sequence: Synthetic primer
cttccccaagactgagcactttcccccagcaccaccatcc

SEQ ID NO: 29606 - DNA, 40 bp, Artificial Sequence
  Description of Artificial Sequence: Synthetic primer
ccctcgcacttgcccttaccttttctatcgagtccgcatc

SEQ ID NO: 29607 - DNA, 40 bp, Artificial Sequence
  Description of Artificial Sequence: Synthetic primer
gataattcaggaaccgagcaaagttccgaagctctgacca

SEQ ID NO: 29608 - DNA, 40 bp, Artificial Sequence
  Description of Artificial Sequence: Synthetic primer
gctggggaagaccagagctggggaattcataccaacatcc

SEQ ID NO: 29609 - DNA, 40 bp, Artificial Sequence
  Description of Artificial Sequence: Synthetic primer
cctcatagtctttccttggaagaatctcatcctcctcctc

SEQ ID NO: 29610 - DNA, 40 bp, Artificial Sequence
  Description of Artificial Sequence: Synthetic primer
aatgcagggacatggccagcccatcctctggagccagcac

SEQ ID NO: 29611 - DNA, 40 bp, Artificial Sequence
  Description of Artificial Sequence: Synthetic primer
tttacagcgtggtcccttttgagtcgaaacatccgccagt

SEQ ID NO: 29612 - DNA, 40 bp, Artificial Sequence
  Description of Artificial Sequence: Synthetic primer
gtcttggcggacgggtaggcggtggcatccctgccgtagt

SEQ ID NO: 29613 - DNA, 40 bp, Artificial Sequence
  Description of Artificial Sequence: Synthetic primer
tgccgggggccgggcggtgggagcagagcagccagaggat

SEQ ID NO: 29614 - DNA, 40 bp, Artificial Sequence
  Description of Artificial Sequence: Synthetic primer
cccagctacaacgccgacatccttctctcacatctccact

SEQ ID NO: 29615 - DNA, 40 bp, Artificial Sequence
  Description of Artificial Sequence: Synthetic primer
ttgtctgttgctgaaacccaagtgacgccatccagcgtga

SEQ ID NO: 29616 - DNA, 40 bp, Artificial Sequence
  Description of Artificial Sequence: Synthetic primer
tccgagccgggtgtgaagtcaatggtgccatccctgccgg

SEQ ID NO: 29617 - DNA, 40 bp, Artificial Sequence
  Description of Artificial Sequence: Synthetic primer
cccgctggtggcgcccatgtgcaggatgagcccctgatag

SEQ ID NO: 29618 - DNA, 40 bp, Artificial Sequence
  Description of Artificial Sequence: Synthetic primer
tcttgtcccggtgacacgtgtacaccatgttcttctggat

SEQ ID NO: 29619 - DNA, 40 bp, Artificial Sequence
  Description of Artificial Sequence: Synthetic primer
gaaagctgtagctgtgtggggctggcaggatgttgaagac

SEQ ID NO: 29620 - DNA, 40 bp, Artificial Sequence
  Description of Artificial Sequence: Synthetic primer
atcctgatgccacgaaaatctcacgtgcttcggggaactg

SEQ ID NO: 29621 - DNA, 40 bp, Artificial Sequence
  Description of Artificial Sequence: Synthetic primer
cggagtcctcctgctcctgctgtccatcctccacccctct

SEQ ID NO: 29622 - DNA, 40 bp, Artificial Sequence
  Description of Artificial Sequence: Synthetic primer
caaataaactgtctgccaactgtgggatgttcacattcat

SEQ ID NO: 29623 - DNA, 40 bp, Artificial Sequence
  Description of Artificial Sequence: Synthetic primer
gccaggtagccagtcaaccatgcaaagggaaaggggaaat

SEQ ID NO: 29624 - DNA, 40 bp, Artificial Sequence
  Description of Artificial Sequence: Synthetic primer
cggcgagcgtcactggtcctgcatctgctgcttcatcctc

SEQ ID NO: 29625 - DNA, 40 bp, Artificial Sequence
  Description of Artificial Sequence: Synthetic primer
tgggtttaccaaaccctagaatgcaggggcccatccagca

SEQ ID NO: 29626 - DNA, 40 bp, Artificial Sequence
  Description of Artificial Sequence: Synthetic primer
gccccaatgctgcccgtggcgatcatggatggcgggtaca

SEQ ID NO: 29627 - DNA, 40 bp, Artificial Sequence
  Description of Artificial Sequence: Synthetic primer
agtctgtttatgtcagggggatggggccattgcatcctta

SEQ ID NO: 29628 - DNA, 40 bp, Artificial Sequence
  Description of Artificial Sequence: Synthetic primer
ccccagctcctcagcagcatgaagaagaggacctggatga

SEQ ID NO: 29629 - DNA, 40 bp, Artificial Sequence
  Description of Artificial Sequence: Synthetic primer
ttcattttcatatgttggatgaaatataaatgaagaaaaa

SEQ ID NO: 29630 - DNA, 40 bp, Artificial Sequence
  Description of Artificial Sequence: Synthetic primer
ggtgggtcagatgcagtatgaaaagcagcggatggaacaa

SEQ ID NO: 29631 - DNA, 40 bp, Artificial Sequence
  Description of Artificial Sequence: Synthetic primer
ctgcaatgtgacggagagtgtgaatgaccatcaggatgaa

SEQ ID NO: 29632 - DNA, 40 bp, Artificial Sequence
  Description of Artificial Sequence: Synthetic primer
gaatcccactaatgcaaactgggatgaaactaaagcaata

SEQ ID NO: 29633 - DNA, 40 bp, Artificial Sequence
  Description of Artificial Sequence: Synthetic primer
caattgaaaagcctttcaatttatccacaacctggatgac

SEQ ID NO: 29634 - DNA, 40 bp, Artificial Sequence
  Description of Artificial Sequence: Synthetic primer
tcctcgttggcagcaaagtggatgttgcccaaatgaagga

SEQ ID NO: 29635 - DNA, 40 bp, Artificial Sequence
  Description of Artificial Sequence: Synthetic primer
cggaactgttccccagcagcgtgggcggcagctcacgtgg

SEQ ID NO: 29636 - DNA, 40 bp, Artificial Sequence
  Description of Artificial Sequence: Synthetic primer
tgcgggctgcttgcagctgctgggagtactgggctgactg

SEQ ID NO: 29637 - DNA, 40 bp, Artificial Sequence
  Description of Artificial Sequence: Synthetic primer
aatgtcatcgtccgcctctcccagatcagtgaggatgtca

SEQ ID NO: 29638 - DNA, 40 bp, Artificial Sequence
  Description of Artificial Sequence: Synthetic primer
atgggcccaggaggcagctgggttgcatggagaggtccag

SEQ ID NO: 29639 - DNA, 40 bp, Artificial Sequence
  Description of Artificial Sequence: Synthetic primer
cccccgcgcgtctccccggctgcggggcgcggggggctgc

SEQ ID NO: 29640 - DNA, 40 bp, Artificial Sequence
  Description of Artificial Sequence: Synthetic primer
cccatccttcgagggtgggcagaggtcacctgggcgtgga

SEQ ID NO: 29641 - DNA, 40 bp, Artificial Sequence
  Description of Artificial Sequence: Synthetic primer
cctgtgcatccagcaaagaggagatggaactggaattgag

SEQ ID NO: 29642 - DNA, 40 bp, Artificial Sequence
  Description of Artificial Sequence: Synthetic primer
agtagcttagctagtgatcagctcatcctttaccataaaa

SEQ ID NO: 29643 - DNA, 40 bp, Artificial Sequence
  Description of Artificial Sequence: Synthetic primer
tggctctgcttcccatctcatcctacctcgcatccccttt

SEQ ID NO: 29644 - DNA, 40 bp, Artificial Sequence
  Description of Artificial Sequence: Synthetic primer
gtgacctcatggatgagggcgagggactggacttcaactt

SEQ ID NO: 29645 - DNA, 40 bp, Artificial Sequence
  Description of Artificial Sequence: Synthetic primer
tcctgcctatagaccaggcgtcttttgccagccaaaacag

SEQ ID NO: 29646 - DNA, 40 bp, Artificial Sequence
  Description of Artificial Sequence: Synthetic primer
gactttgtggccgatgtccgtttgatcttcaagaactgtg

SEQ ID NO: 29647 - DNA, 40 bp, Artificial Sequence
  Description of Artificial Sequence: Synthetic primer
gatgctgctcaggagccagcacaggacaccccccacccca

SEQ ID NO: 29648 - DNA, 40 bp, Artificial Sequence
  Description of Artificial Sequence: Synthetic primer
tccccagaccccagagccttgaccttggggctaccttcac

SEQ ID NO: 29649 - DNA, 40 bp, Artificial Sequence
  Description of Artificial Sequence: Synthetic primer
cgcaacaccctccctgcaatggacaacagccgacttcacc

SEQ ID NO: 29650 - DNA, 40 bp, Artificial Sequence
  Description of Artificial Sequence: Synthetic primer
gtgccctccagcctcagagctagccacaaagcccccagag

SEQ ID NO: 29651 - DNA, 40 bp, Artificial Sequence
  Description of Artificial Sequence: Synthetic primer
ggaaaaattttgaacgggctttaacatgtttaagaaatat

SEQ ID NO: 29652 - DNA, 40 bp, Artificial Sequence
  Description of Artificial Sequence: Synthetic primer
gtatctggcgtacgtggcgtcctcgcacaagagcaagaag

SEQ ID NO: 29653 - DNA, 40 bp, Artificial Sequence
  Description of Artificial Sequence: Synthetic primer
accctatgggagtgggcatctccacgcacctgtgtatgtg

SEQ ID NO: 29654 - DNA, 40 bp, Artificial Sequence
  Description of Artificial Sequence: Synthetic primer
tcaggcactctggtacttcactgagccagcaaaccccatc

SEQ ID NO: 29655 - DNA, 40 bp, Artificial Sequence
  Description of Artificial Sequence: Synthetic primer
cgccgtggggagcggcagggcggggctgacgttggaggat

SEQ ID NO: 29656 - DNA, 40 bp, Artificial Sequence
  Description of Artificial Sequence: Synthetic primer
tccgtgcagtccgtgtcacctctgcctcccggattacagg

SEQ ID NO: 29657 - DNA, 40 bp, Artificial Sequence
  Description of Artificial Sequence: Synthetic primer
gtataaaatggctcctcaccaggactgtccatttcatcct

SEQ ID NO: 29658 - DNA, 40 bp, Artificial Sequence
  Description of Artificial Sequence: Synthetic primer
tttctcttccctgaactcctatttgttttgaagggatact

SEQ ID NO: 29659 - DNA, 40 bp, Artificial Sequence
  Description of Artificial Sequence: Synthetic primer
catgtgtgctaaaggcaaataggaaatgtgcacatccgca

SEQ ID NO: 29660 - DNA, 40 bp, Artificial Sequence
  Description of Artificial Sequence: Synthetic primer
tcttgctccaggtgtctccaattctataggatgtccttgt

SEQ ID NO: 29661 - DNA, 40 bp, Artificial Sequence
  Description of Artificial Sequence: Synthetic primer
ttgtagatgccagcggggaggggcacctcacgcccatggg

SEQ ID NO: 29662 - DNA, 40 bp, Artificial Sequence
  Description of Artificial Sequence: Synthetic primer
agagaaagttgtcggagaaactggacagcacagacttcac

SEQ ID NO: 29663 - DNA, 40 bp, Artificial Sequence
  Description of Artificial Sequence: Synthetic primer
ccagaaattaggatgatatttaggcaccaaactgttatta

SEQ ID NO: 29664 - DNA, 40 bp, Artificial Sequence
  Description of Artificial Sequence: Synthetic primer
ggccgacgccctacgagtggatgcggcgcagcgtggcggc

SEQ ID NO: 29665 - DNA, 40 bp, Artificial Sequence
  Description of Artificial Sequence: Synthetic primer
gatggtgagatccatgggggtcttggtgaatgagggaagc

SEQ ID NO: 29666 - DNA, 40 bp, Artificial Sequence
  Description of Artificial Sequence: Synthetic primer
ccgcaggcggtactcagacaaatacaacgtgcccatttcg

SEQ ID NO: 29667 - DNA, 40 bp, Artificial Sequence
  Description of Artificial Sequence: Synthetic primer
aatgcaattcacaacccaattttaatacatccctatatct

SEQ ID NO: 29668 - DNA, 40 bp, Artificial Sequence
  Description of Artificial Sequence: Synthetic primer
cagctatagcagcagaagccacggaaggctctcaggctca

SEQ ID NO: 29669 - DNA, 40 bp, Artificial Sequence
  Description of Artificial Sequence: Synthetic primer
atcctctgtggcaaacagggtcttggggaagcggatgaag

SEQ ID NO: 29670 - DNA, 40 bp, Artificial Sequence
  Description of Artificial Sequence: Synthetic primer
gtcagtgacaggtgaggtacttcggttgcccttggtcttc

SEQ ID NO: 29671 - DNA, 40 bp, Artificial Sequence
  Description of Artificial Sequence: Synthetic primer
ctcatccttgcccaggtgagggaaggagacaggatgaggt

SEQ ID NO: 29672 - DNA, 40 bp, Artificial Sequence
  Description of Artificial Sequence: Synthetic primer
agaaccagaaactgcgaatcatcctcaaactggaccagac

SEQ ID NO: 29673 - DNA, 40 bp, Artificial Sequence
  Description of Artificial Sequence: Synthetic primer
tgtgtttaagtcaccagatattttgttcccatcagtttag

SEQ ID NO: 29674 - DNA, 40 bp, Artificial Sequence
  Description of Artificial Sequence: Synthetic primer
gcctgcccttgtgaagcctgattaattaagctatggccag

SEQ ID NO: 29675 - DNA, 40 bp, Artificial Sequence
  Description of Artificial Sequence: Synthetic primer
ccgggacgcagcaggaggccaggccggcgagccctgtgga

SEQ ID NO: 29676 - DNA, 40 bp, Artificial Sequence
  Description of Artificial Sequence: Synthetic primer
cgtaatgccaggtgaggagaatcccctttcccatcccaac

SEQ ID NO: 29677 - DNA, 40 bp, Artificial Sequence
  Description of Artificial Sequence: Synthetic primer
cagtcttttcgcatagagcccgtcgggggccatccagagg

SEQ ID NO: 29678 - DNA, 40 bp, Artificial Sequence
  Description of Artificial Sequence: Synthetic primer
tccacgacctggacctgacgctgctcaacccgcgcatgat

SEQ ID NO: 29679 - DNA, 40 bp, Artificial Sequence
  Description of Artificial Sequence: Synthetic primer
tctcctatatgaaattttggatactgttaaaatataactc

SEQ ID NO: 29680 - DNA, 40 bp, Artificial Sequence; identical to SEQ ID NO: 19730
  Description of Artificial Sequence: Synthetic primer

SEQ ID NO: 29681 - DNA, 40 bp, Artificial Sequence
  Description of Artificial Sequence: Synthetic primer
taagaaatgtgctttttagagcttcctaatgcatgtgttg

SEQ ID NO: 29682 - DNA, 40 bp, Artificial Sequence
  Description of Artificial Sequence: Synthetic primer
tccccttcctacctccaattcccacactaccaatattatc

SEQ ID NO: 29683 - DNA, 40 bp, Artificial Sequence
  Description of Artificial Sequence: Synthetic primer
ccttttttgccctctgtaagagttgcttagcaatggttgc

SEQ ID NO: 29684 - DNA, 40 bp, Artificial Sequence
  Description of Artificial Sequence: Synthetic primer
tcgaaaagcactttgaaaaattgttcccgagcgatagatg

SEQ ID NO: 29685 - DNA, 40 bp, Artificial Sequence
  Description of Artificial Sequence: Synthetic primer
aaaaatagagaaacaaggaggacaggtactgactggcaac

SEQ ID NO: 29686 - DNA, 40 bp, Artificial Sequence
  Description of Artificial Sequence: Synthetic primer
actattgagtttcagtgtgacacaccctctttgtagcttg

SEQ ID NO: 29687 - DNA, 40 bp, Artificial Sequence
  Description of Artificial Sequence: Synthetic primer
ttgattgaacgtcagtcctttagaaagatacattcattag

SEQ ID NO: 29688 - DNA, 40 bp, Artificial Sequence
  Description of Artificial Sequence: Synthetic primer
gcagaatagtgtgcaccgccaggctgctggggcccagtgg

SEQ ID NO: 29689 - DNA, 40 bp, Artificial Sequence
  Description of Artificial Sequence: Synthetic primer
gttccccaagtgtccctgatctatggagctggccatggtg

SEQ ID NO: 29690 - DNA, 40 bp, Artificial Sequence
  Description of Artificial Sequence: Synthetic primer
tcaagagggaaacataaagaaagtgagacactgacagaac

SEQ ID NO: 29691 - DNA, 40 bp, Artificial Sequence
  Description of Artificial Sequence: Synthetic primer
gtaagaatggccacagagtagtgaaatactgtttcttctg

SEQ ID NO: 29692 - DNA, 40 bp, Artificial Sequence
  Description of Artificial Sequence: Synthetic primer
tggagccaccagcagcgggtgggcgacctcttccagaagc

SEQ ID NO: 29693 - DNA, 40 bp, Artificial Sequence
  Description of Artificial Sequence: Synthetic primer
ggggttaaatattcttcagcaaagagggtcacaggtaagg

SEQ ID NO: 29694 - DNA, 40 bp, Artificial Sequence
  Description of Artificial Sequence: Synthetic primer
actgtctttgctcaggctaacgagctggagaaatacagag

SEQ ID NO: 29695 - DNA, 40 bp, Artificial Sequence
  Description of Artificial Sequence: Synthetic primer
cttcctggcccgtggtcagggactgcgccttccaccactc

SEQ ID NO: 29696 - DNA, 40 bp, Artificial Sequence
  Description of Artificial Sequence: Synthetic primer
acatgctcagcatctgtgcctgcagcagcctggtcagtgg

SEQ ID NO: 29697 - DNA, 40 bp, Artificial Sequence
  Description of Artificial Sequence: Synthetic primer
gcagcttcaacttttacaacaacaacatgctggaaaacag

SEQ ID NO: 29698 - DNA, 40 bp, Artificial Sequence
  Description of Artificial Sequence: Synthetic primer
cagctcagcccacaggtgtgcctgctctgcagccctcagc

SEQ ID NO: 29699 - DNA, 40 bp, Artificial Sequence
  Description of Artificial Sequence: Synthetic primer
ttacaatgaaaagagtgagacctgggaagtccttgatttg

SEQ ID NO: 29700 - DNA, 40 bp, Artificial Sequence
  Description of Artificial Sequence: Synthetic primer
atcagacatacttcaaatcttttgaagaaaatggcaaagg

SEQ ID NO: 29701 - DNA, 40 bp, Artificial Sequence
  Description of Artificial Sequence: Synthetic primer
aaagtatattgccaacgacatcgggatttgatcaaaggcg

SEQ ID NO: 29702 - DNA, 40 bp, Artificial Sequence
  Description of Artificial Sequence: Synthetic primer
cacttttgtggatcaccgctgtgtggctactgttggctac

SEQ ID NO: 29703 - DNA, 40 bp, Artificial Sequence
  Description of Artificial Sequence: Synthetic primer
gagcagctgctacaacccagagcgtgtgaagaacttcctg

SEQ ID NO: 29704 - DNA, 40 bp, Artificial Sequence
  Description of Artificial Sequence: Synthetic primer
agcttccactttgaaatatggaagccccacgtattacacc

SEQ ID NO: 29705 - DNA, 40 bp, Artificial Sequence
  Description of Artificial Sequence: Synthetic primer
cgtaacacctgagccccttccagttccacctgcagagttc

SEQ ID NO: 29706 - DNA, 40 bp, Artificial Sequence
  Description of Artificial Sequence: Synthetic primer
ctcttccagggcctggacaggtcaagaggcagtttctggc

SEQ ID NO: 29707 - DNA, 40 bp, Artificial Sequence
  Description of Artificial Sequence: Synthetic primer
agacccctgaaaacgagcgatcacgggcttccctgacgac

SEQ ID NO: 29708 - DNA, 40 bp, Artificial Sequence
  Description of Artificial Sequence: Synthetic primer
ccagaaaggctccacggccagccagacgcggtcatttaag

SEQ ID NO: 29709 - DNA, 40 bp, Artificial Sequence
  Description of Artificial Sequence: Synthetic primer
ctcccgaagtcctctgtggccagctgcatctgtctgaatg

SEQ ID NO: 29710 - DNA, 40 bp, Artificial Sequence
  Description of Artificial Sequence: Synthetic primer
aacgccaggccgggagcgccgagccgcgccgcggttgtcc

SEQ ID NO: 29711 - DNA, 40 bp, Artificial Sequence
  Description of Artificial Sequence: Synthetic primer
aggtgtacacctgcactatctgcagtcgggcatacacatc

SEQ ID NO: 29712 - DNA, 40 bp, Artificial Sequence
  Description of Artificial Sequence: Synthetic primer
aatgaagatgttgtggagaaagtctgtgagattcatttcc

SEQ ID NO: 29713 - DNA, 40 bp, Artificial Sequence
  Description of Artificial Sequence: Synthetic primer
tatatatttttctgagatttttgatatctcaatctgcagc

SEQ ID NO: 29714 - DNA, 40 bp, Artificial Sequence
  Description of Artificial Sequence: Synthetic primer
tccgggacatttgcaggtttacattctgcacggtgtcttc

SEQ ID NO: 29715 - DNA, 40 bp, Artificial Sequence
  Description of Artificial Sequence: Synthetic primer
cacctgaaagtttctgttcctgatgaaatgtctgcagatc

SEQ ID NO: 29716 - DNA, 40 bp, Artificial Sequence
  Description of Artificial Sequence: Synthetic primer
gaaggccgtgttgatgccgtctgtgcaggagcccccgttg

SEQ ID NO: 29717 - DNA, 40 bp, Artificial Sequence
  Description of Artificial Sequence: Synthetic primer
tagcttccttggaaggaaagaaaatcaaagattctacagc

SEQ ID NO: 29718 - DNA, 40 bp, Artificial Sequence
  Description of Artificial Sequence: Synthetic primer
gttgcacttcttttttgggagatgtgtgttgttgatgttc

SEQ ID NO: 29719 - DNA, 40 bp, Artificial Sequence
  Description of Artificial Sequence: Synthetic primer
aggttttcagcttttccatgtggctcaatatcaacttttc

SEQ ID NO: 29720 - DNA, 40 bp, Artificial Sequence
  Description of Artificial Sequence: Synthetic primer
ctgcgcctccgcttgctccggcgctccgccggcgagctcg

SEQ ID NO: 29721 - DNA, 40 bp, Artificial Sequence
  Description of Artificial Sequence: Synthetic primer
ctgcagcaaggtactcacagccccacggacgccttgtttc

SEQ ID NO: 29722 - DNA, 40 bp, Artificial Sequence
  Description of Artificial Sequence: Synthetic primer
agatgatagcacttcattgactgccaaagaggatgtcagc

SEQ ID NO: 29723 - DNA, 40 bp, Artificial Sequence
  Description of Artificial Sequence: Synthetic primer
cagtttctgtgaataggctgagctttgtgaggaacagatg

SEQ ID NO: 29724 - DNA, 40 bp, Artificial Sequence
  Description of Artificial Sequence: Synthetic primer
aaatgacatgcagtttaatccagagatcactgcttctggg

SEQ ID NO: 29725 - DNA, 40 bp, Artificial Sequence
  Description of Artificial Sequence: Synthetic primer
acaggggttgctgatgcatgcgtcgttgaggtggcacagc

SEQ ID NO: 29726 - DNA, 40 bp, Artificial Sequence
  Description of Artificial Sequence: Synthetic primer
gaaagccctcggtcaagctcgccaccaattctcacaaagc

SEQ ID NO: 29727 - DNA, 40 bp, Artificial Sequence
  Description of Artificial Sequence: Synthetic primer
gggagtccatgtcccagccacacctcagggctctcctatg

SEQ ID NO: 29728 - DNA, 40 bp, Artificial Sequence
  Description of Artificial Sequence: Synthetic primer
ttggaaaatgaaggcctgaaaaagaaacaagtaaaactgg

SEQ ID NO: 29729 - DNA, 40 bp, Artificial Sequence
  Description of Artificial Sequence: Synthetic primer
gaccacgggatccaagctttgtaaatatccctcaacagac

SEQ ID NO: 29730 - DNA, 40 bp, Artificial Sequence
  Description of Artificial Sequence: Synthetic primer
ctccccgaggccggccgcctggtcatggcgcagccgggcc

SEQ ID NO: 29731 - DNA, 40 bp, Artificial Sequence
  Description of Artificial Sequence: Synthetic primer
ctcaaactggcgtcggagctcagcttcattctgactgttg

SEQ ID NO: 29732 - DNA, 40 bp, Artificial Sequence
  Description of Artificial Sequence: Synthetic primer
aaacaagagtcttgtcaagatttggtgcaaaacttttacc

SEQ ID NO: 29733 - DNA, 40 bp, Artificial Sequence
  Description of Artificial Sequence: Synthetic primer
tctcatagtcatcatcatcataacatttgtcacagagagg

SEQ ID NO: 29734 - DNA, 40 bp, Artificial Sequence
  Description of Artificial Sequence: Synthetic primer
ctggccgctgcccaggccggagtttagccagtccaactcg

SEQ ID NO: 29735 - DNA, 40 bp, Artificial Sequence
  Description of Artificial Sequence: Synthetic primer
ctgcttccagctcgctgacgtggcccttcagctgcagcac

SEQ ID NO: 29736 - DNA, 40 bp, Artificial Sequence
  Description of Artificial Sequence: Synthetic primer
ccttctccttctggaaggaaaaatctctttacttgccgag

SEQ ID NO: 29737 - DNA, 40 bp, Artificial Sequence
  Description of Artificial Sequence: Synthetic primer
gaaaaagaaaatgcagttatattccttttttatttgttcc

SEQ ID NO: 29738 - DNA, 40 bp, Artificial Sequence
  Description of Artificial Sequence: Synthetic primer
tcagggagggtctctcccatttccctgcactcagggtatc

SEQ ID NO: 29739 - DNA, 40 bp, Artificial Sequence
  Description of Artificial Sequence: Synthetic primer
aagccattggtcatttgatgggccagacagacttcacaac

SEQ ID NO: 29740 - DNA, 40 bp, Artificial Sequence
  Description of Artificial Sequence: Synthetic primer
gacagcaaatggaaaaagataggcaggttcacaggaaaac

SEQ ID NO: 29741 - DNA, 40 bp, Artificial Sequence
  Description of Artificial Sequence: Synthetic primer
acttgtgtcttgaaatctagaattatttcacgcagaattg

SEQ ID NO: 29742 - DNA, 40 bp, Artificial Sequence
  Description of Artificial Sequence: Synthetic primer
cctcatgagaaaagaggctctggtgccctgagagaagctg

SEQ ID NO: 29743 - DNA, 40 bp, Artificial Sequence
  Description of Artificial Sequence: Synthetic primer
gcctgtgcttgccagtctatcttcagctgcctttttatgc

SEQ ID NO: 29744 - DNA, 40 bp, Artificial Sequence
  Description of Artificial Sequence: Synthetic primer
taaaatctatttacatacataaatacaattaactttgttg

SEQ ID NO: 29745 - DNA, 40 bp, Artificial Sequence
  Description of Artificial Sequence: Synthetic primer
gttttcatgttttgacaattgcccaccatttacaatactc

SEQ ID NO: 29746 - DNA, 40 bp, Artificial Sequence
  Description of Artificial Sequence: Synthetic primer
actaaacctgcaggagaacctagcccaagggtgaacaaac

SEQ ID NO: 29747 - DNA, 40 bp, Artificial Sequence
  Description of Artificial Sequence: Synthetic primer
gtttaggtgcatggatttactcagtatctacactacagtc

SEQ ID NO: 29748 - DNA, 40 bp, Artificial Sequence
  Description of Artificial Sequence: Synthetic primer
gccacacgggacatgctgcgcggcagcggcaggatttggg

SEQ ID NO: 29749 - DNA, 40 bp, Artificial Sequence
  Description of Artificial Sequence: Synthetic primer
gcagaaactcccgcaggttacccttggccgcgtactccac

SEQ ID NO: 29750 - DNA, 40 bp, Artificial Sequence
  Description of Artificial Sequence: Synthetic primer
tgcacacgaatgaacttgctgtgtagggacagattatgac

SEQ ID NO: 29751 - DNA, 40 bp, Artificial Sequence
  Description of Artificial Sequence: Synthetic primer
gcagacgtgacggtcttcaggtagtaggtgtcaggcagag

SEQ ID NO: 29752 - DNA, 40 bp, Artificial Sequence
  Description of Artificial Sequence: Synthetic primer
aaaacaaaacttttcaacatgggcatactgggctacatgg

SEQ ID NO: 29753 - DNA, 40 bp, Artificial Sequence
  Description of Artificial Sequence: Synthetic primer
gtgagagtgccacaggagacccactcaccaattcaacatc

SEQ ID NO: 29754 - DNA, 40 bp, Artificial Sequence
  Description of Artificial Sequence: Synthetic primer
cctgactctaagataacagaaaatgccagaaaggtagagg

SEQ ID NO: 29755 - DNA, 40 bp, Artificial Sequence
  Description of Artificial Sequence: Synthetic primer
ccagcggcgcgcccgctgcgctgctgcctgttgaatgtgg

SEQ ID NO: 29756 - DNA, 40 bp, Artificial Sequence
  Description of Artificial Sequence: Synthetic primer
ggggagcttggcgtgtggaaatctacaggtgacatacgag

SEQ ID NO: 29757 - DNA, 40 bp, Artificial Sequence
  Description of Artificial Sequence: Synthetic primer
tattatattaacaataaaacctcaacaaaattacagacag

SEQ ID NO: 29758 - DNA, 40 bp, Artificial Sequence
  Description of Artificial Sequence: Synthetic primer
atcctgcaggtacaagctggaggtggagcagacgctgtgg

SEQ ID NO: 29759 - DNA, 40 bp, Artificial Sequence
  Description of Artificial Sequence: Synthetic primer
atgcaggttgacagcttccaactggctgaaggtgggtttg

SEQ ID NO: 29760 - DNA, 40 bp, Artificial Sequence
  Description of Artificial Sequence: Synthetic primer
cagagtctaatttactgggatctgtcaagctttcataccg

SEQ ID NO: 29761 - DNA, 40 bp, Artificial Sequence
  Description of Artificial Sequence: Synthetic primer
ggactggaggccaggctggggctgcatgccgggctgattg

SEQ ID NO: 29762 - DNA, 40 bp, Artificial Sequence
  Description of Artificial Sequence: Synthetic primer
ttactgcaaccattccagccaggtagcaagccgcccttcc

SEQ ID NO: 29763 - DNA, 40 bp, Artificial Sequence
  Description of Artificial Sequence: Synthetic primer
gggagttttgcaaattgcccatttttaggtctggtgaagc

SEQ ID NO: 29764 - DNA, 40 bp, Artificial Sequence
  Description of Artificial Sequence: Synthetic primer
ctggccccacgttccctgaggagatgggagagacccagtc

SEQ ID NO: 29765 - DNA, 40 bp, Artificial Sequence
  Description of Artificial Sequence: Synthetic primer
ggtccggatatgaatgatagactggacaatggcttcacac

SEQ ID NO: 29766 - DNA, 40 bp, Artificial Sequence
  Description of Artificial Sequence: Synthetic primer
acttgctgcaccttagagaacgatgggagcagcaggtgtc

SEQ ID NO: 29767 - DNA, 40 bp, Artificial Sequence
  Description of Artificial Sequence: Synthetic primer
gcccggtcataatgtgtgaacatctgattgcctagaatag

SEQ ID NO: 29768 - DNA, 40 bp, Artificial Sequence
  Description of Artificial Sequence: Synthetic primer
gcattgacaaggaccgggccgccaagcctgtcaccgtagc

SEQ ID NO: 29769 - DNA, 40 bp, Artificial Sequence
  Description of Artificial Sequence: Synthetic primer
aaccactgcaggagttcttcagccaattcagtatctttag

SEQ ID NO: 29770 - DNA, 40 bp, Artificial Sequence
  Description of Artificial Sequence: Synthetic primer
gaaagtctccagccttcctgggaagaacatggacgtgaac

SEQ ID NO: 29771 - DNA, 40 bp, Artificial Sequence
  Description of Artificial Sequence: Synthetic primer
tttcttctagttctttttgtatcttgtagattttctctgc

SEQ ID NO: 29772 - DNA, 40 bp, Artificial Sequence
  Description of Artificial Sequence: Synthetic primer
tttgcgggacaaagggcaagatttcgaatcaatccaacag

SEQ ID NO: 29773 - DNA, 40 bp, Artificial Sequence
  Description of Artificial Sequence: Synthetic primer
gctgaacaaagggggcaaaacttactgctaactaatctgc

SEQ ID NO: 29774 - DNA, 40 bp, Artificial Sequence
  Description of Artificial Sequence: Synthetic primer
gggccagttttgccatcaggaccagggctgccagggcttc

SEQ ID NO: 29775 - DNA, 40 bp, Artificial Sequence
  Description of Artificial Sequence: Synthetic primer
agggctgctttgtgaggggctgttcattttgagtgcatag

SEQ ID NO: 29776 - DNA, 40 bp, Artificial Sequence
  Description of Artificial Sequence: Synthetic primer
aaaccagaaaggctattgtagcagcaaagtcaaaaattgc

SEQ ID NO: 29777 - DNA, 40 bp, Artificial Sequence
  Description of Artificial Sequence: Synthetic primer
ggtacatgctggctgcgctctggccgcactcgtcaaagtc

SEQ ID NO: 29778 - DNA, 40 bp, Artificial Sequence
  Description of Artificial Sequence: Synthetic primer
ctcgccgcaagcaaggcaaaccccagcacttaagcaaacg

SEQ ID NO: 29779 - DNA, 40 bp, Artificial Sequence
  Description of Artificial Sequence: Synthetic primer
ctgtctggtcgtccaggtcaggcagaaccacgggctcctc

SEQ ID NO: 29780 - DNA, 40 bp, Artificial Sequence
  Description of Artificial Sequence: Synthetic primer
agagtgcccagttccttgatcctgtcgttaatgttgaatc

SEQ ID NO: 29781 - DNA, 40 bp, Artificial Sequence
  Description of Artificial Sequence: Synthetic primer
atggggccagggagaccgttgagtccatctttgccaggag

SEQ ID NO: 29782 - DNA, 40 bp, Artificial Sequence
  Description of Artificial Sequence: Synthetic primer
ccagcgctggcgaaatcgccctgtccacgcgcaacgtgtc

SEQ ID NO: 29783 - DNA, 40 bp, Artificial Sequence
  Description of Artificial Sequence: Synthetic primer
ccgctggtggtccgtgtacaccactcgatatttgtctttc

SEQ ID NO: 29784 - DNA, 40 bp, Artificial Sequence
  Description of Artificial Sequence: Synthetic primer
ctgacagatgtcacagaaggcaagcttcaggaacgtcttc

SEQ ID NO: 29785 - DNA, 40 bp, Artificial Sequence
  Description of Artificial Sequence: Synthetic primer
gctgtgacagcagtctgcccaggcacagaaaaggaggaag

SEQ ID NO: 29786 - DNA, 40 bp, Artificial Sequence
  Description of Artificial Sequence: Synthetic primer
tcttcctgctggctatcaatttctaggcctgcttctgaac

SEQ ID NO: 29787 - DNA, 40 bp, Artificial Sequence
  Description of Artificial Sequence: Synthetic primer
ccagcgctgggaggaccagggggaccaggaggtccaggag

SEQ ID NO: 29788 - DNA, 40 bp, Artificial Sequence
  Description of Artificial Sequence: Synthetic primer
tgtctcctcttcattgtcgttttaaccctgctaatttgtc

SEQ ID NO: 29789 - DNA, 40 bp, Artificial Sequence
  Description of Artificial Sequence: Synthetic primer
gctccgtgtaggttacggcgtcccgtatcacattctccag

SEQ ID NO: 29790 - DNA, 40 bp, Artificial Sequence
  Description of Artificial Sequence: Synthetic primer
gtggctgagcctcaccccggctttttatttaacagctcac

SEQ ID NO: 29791 - DNA, 40 bp, Artificial Sequence
  Description of Artificial Sequence: Synthetic primer
ggcctttgagttctaatattttgtattgctcttcaaatgg

SEQ ID NO: 29792 - DNA, 40 bp, Artificial Sequence
  Description of Artificial Sequence: Synthetic primer
ctacaagttccccattcgctccaatgaccaacttcacatc

SEQ ID NO: 29793 - DNA, 40 bp, Artificial Sequence
  Description of Artificial Sequence: Synthetic primer
cttgtaattccctttaatgagctcagctttctttttcacg

SEQ ID NO: 29794 - DNA, 40 bp, Artificial Sequence
  Description of Artificial Sequence: Synthetic primer
cacagtcctggagatgactccggtgcttgggacagaaatc

SEQ ID NO: 29795 - DNA, 40 bp, Artificial Sequence
  Description of Artificial Sequence: Synthetic primer
gcacccacttcactgagtcgcacagcagcctctcttcatc

SEQ ID NO: 29796 - DNA, 40 bp, Artificial Sequence
  Description of Artificial Sequence: Synthetic primer
aggggaaagagaattcaaaaccccaacaatttctctgaag

SEQ ID NO: 29797 - DNA, 40 bp, Artificial Sequence
  Description of Artificial Sequence: Synthetic primer
ctgtggtccagacccttgtagctaaagaaaaagcactgag

SEQ ID NO: 29798 - DNA, 40 bp, Artificial Sequence
  Description of Artificial Sequence: Synthetic primer
ttaatacaaaaacaatttgaataagagatttttatcttgc

SEQ ID NO: 29799 - DNA, 40 bp, Artificial Sequence
  Description of Artificial Sequence: Synthetic primer
tctggtaagctggtgagcactggctagctgttatgactac

SEQ ID NO: 29800 - DNA, 40 bp, Artificial Sequence
  Description of Artificial Sequence: Synthetic primer
ctccattatctgcacaaaatcctgtgacagcaacttatct

SEQ ID NO: 29801 - DNA, 40 bp, Artificial Sequence
  Description of Artificial Sequence: Synthetic primer
cagcgcactgttgaggtctttgaacaggctggtgctggag

SEQ ID NO: 29802 - DNA, 40 bp, Artificial Sequence
  Description of Artificial Sequence: Synthetic primer
ggggctatgtcagaagaggacttcatagaggaggctgaag

SEQ ID NO: 29803 - DNA, 40 bp, Artificial Sequence
  Description of Artificial Sequence: Synthetic primer
cctggagcatctgggaatatggagagaatcactagtcctg

SEQ ID NO: 29804 - DNA, 40 bp, Artificial Sequence
  Description of Artificial Sequence: Synthetic primer
gcacacgagagtgaacagcagaaagaggcttcttggaaac

SEQ ID NO: 29805 - DNA, 40 bp, Artificial Sequence
  Description of Artificial Sequence: Synthetic primer
cccagcccactgggaattctgatctggagtggggctattc

SEQ ID NO: 29806 - DNA, 40 bp, Artificial Sequence
  Description of Artificial Sequence: Synthetic primer
tgatacttggcaaaagtgtcactgaaagacaagctaaatg

SEQ ID NO: 29807 - DNA, 40 bp, Artificial Sequence
  Description of Artificial Sequence: Synthetic primer
agaatttttagagttgacagaacagagtcaaaaattacag

SEQ ID NO: 29808 - DNA, 40 bp, Artificial Sequence
  Description of Artificial Sequence: Synthetic primer
gtgtattgtttcagaacctaataaatacaatgacgttaag

SEQ ID NO: 29809 - DNA, 40 bp, Artificial Sequence
  Description of Artificial Sequence: Synthetic primer
ccaaatgattcattcccaaaaacagaagcaaaggggtctg

SEQ ID NO: 29810 - DNA, 40 bp, Artificial Sequence
  Description of Artificial Sequence: Synthetic primer
cataggtaccagctgacatgatgtgtcactagctctgtgg

SEQ ID NO: 29811 - DNA, 40 bp, Artificial Sequence
  Description of Artificial Sequence: Synthetic primer
cgaggcgccaaacaccgtcgccttggactggaagctgcac

SEQ ID NO: 29812 - DNA, 40 bp, Artificial Sequence
  Description of Artificial Sequence: Synthetic primer
ctcccctgacagtccctcctctccggagcattttgatacc

SEQ ID NO: 29813 - DNA, 40 bp, Artificial Sequence
  Description of Artificial Sequence: Synthetic primer
aagggccggggcccaggtggcgccggcaggctcagacacc

SEQ ID NO: 29814 - DNA, 40 bp, Artificial Sequence
  Description of Artificial Sequence: Synthetic primer
tttcctttagggtgttggagggggtggaaaaggtattgag

SEQ ID NO: 29815 - DNA, 40 bp, Artificial Sequence
  Description of Artificial Sequence: Synthetic primer
tcatcatcagtgatgcagctcaatttcccccgttttagtc

SEQ ID NO: 29816 - DNA, 40 bp, Artificial Sequence
  Description of Artificial Sequence: Synthetic primer
gtccaagacaaagagacagagagaaatcttcagagaattg

SEQ ID NO: 29817 - DNA, 40 bp, Artificial Sequence
  Description of Artificial Sequence: Synthetic primer
gaacttagctaagctctctcagaactccttggcttcacag

SEQ ID NO: 29818 - DNA, 40 bp, Artificial Sequence
  Description of Artificial Sequence: Synthetic primer
ggtccctgagctccagcctctccatctttgccagcaggac

SEQ ID NO: 29819 - DNA, 40 bp, Artificial Sequence
  Description of Artificial Sequence: Synthetic primer
ccgcctgcccaggcctttggcacagaggctgagtggacag

SEQ ID NO: 29820 - DNA, 40 bp, Artificial Sequence
  Description of Artificial Sequence: Synthetic primer
cgccgggttactaggttgctgctgatggctgggccagatg

SEQ ID NO: 29821 - DNA, 40 bp, Artificial Sequence
  Description of Artificial Sequence: Synthetic primer
ttctaagattctctgtgggaaaatgactgtcaataaaatg

SEQ ID NO: 29822 - DNA, 40 bp, Artificial Sequence
  Description of Artificial Sequence: Synthetic primer
ggcggcaccggctcatcactcaggtttatctctcccacac

SEQ ID NO: 29823 - DNA, 40 bp, Artificial Sequence
  Description of Artificial Sequence: Synthetic primer
attagccagctcatactcttcaagaagaacccatatccag

SEQ ID NO: 29824 - DNA, 40 bp, Artificial Sequence
  Description of Artificial Sequence: Synthetic primer
gttgtttcctggacaatcgtcgatattttcctcacagttc

SEQ ID NO: 29825 - DNA, 40 bp, Artificial Sequence
  Description of Artificial Sequence: Synthetic primer
catgagcttcctctaaatctagttgtatttttcgtctgag

SEQ ID NO: 29826 - DNA, 40 bp, Artificial Sequence
  Description of Artificial Sequence: Synthetic primer
cagcatttgagactgcttctgctgtatattatattccaag

SEQ ID NO: 29827 - DNA, 40 bp, Artificial Sequence
  Description of Artificial Sequence: Synthetic primer
gcgggcacccgctggctggctccgcgctgaccgactgacc

SEQ ID NO: 29828 - DNA, 40 bp, Artificial Sequence
  Description of Artificial Sequence: Synthetic primer
aattttcttctggagactttgcaggaggccaaaaggaaac

SEQ ID NO: 29829 - DNA, 40 bp, Artificial Sequence
  Description of Artificial Sequence: Synthetic primer
atcctctctctcttcccacatcatcaaagaggaaaagctc

SEQ ID NO: 29830 - DNA, 40 bp, Artificial Sequence
  Description of Artificial Sequence: Synthetic primer
gtcatctcctcaatcctcaaaaagaggctgaatcaatgtg

SEQ ID NO: 29831 - DNA, 40 bp, Artificial Sequence
  Description of Artificial Sequence: Synthetic primer
gtgggaaaatgcacacatttctgaggggagagggaaaagg

SEQ ID NO: 29832 - DNA, 40 bp, Artificial Sequence
  Description of Artificial Sequence: Synthetic primer
tcataatcacaaagtgtgctgggttaaagaagcaggagac

SEQ ID NO: 29833 - DNA, 40 bp, Artificial Sequence
  Description of Artificial Sequence: Synthetic primer
ggattcaatcaaggctgatgggacctctctggacttcagc

SEQ ID NO: 29834 - DNA, 40 bp, Artificial Sequence
  Description of Artificial Sequence: Synthetic primer
cgttcagaacattttagaaatgctgttgcgactcctggac

SEQ ID NO: 29835 - DNA, 40 bp, Artificial Sequence
  Description of Artificial Sequence: Synthetic primer
cccccagcaacgggtagcacttacatggaccaaaagtatg

SEQ ID NO: 29836 - DNA, 40 bp, Artificial Sequence
  Description of Artificial Sequence: Synthetic primer
tctgacattgatatccccatcttatctgaatcttgtccag

SEQ ID NO: 29837 - DNA, 40 bp, Artificial Sequence
  Description of Artificial Sequence: Synthetic primer
tctgcatgagtgccagttgctgttgatgttgctggtattg

SEQ ID NO: 29838 - DNA, 40 bp, Artificial Sequence
  Description of Artificial Sequence: Synthetic primer
tcaggagagacttgtgaatgaaacccgagagtgtcaaagc

SEQ ID NO: 29839 - DNA, 40 bp, Artificial Sequence
  Description of Artificial Sequence: Synthetic primer
tatttcaggatctcagtcaacttcaagaggcttggttagc

SEQ ID NO: 29840 - DNA, 40 bp, Artificial Sequence
  Description of Artificial Sequence: Synthetic primer
ctgcctttgttgctgctgcacattaggttgcagtatgtgg

SEQ ID NO: 29841 - DNA, 40 bp, Artificial Sequence
  Description of Artificial Sequence: Synthetic primer
gacacactgagggcggcgcgatgggagacgagatggatgc

SEQ ID NO: 29842 - DNA, 40 bp, Artificial Sequence
  Description of Artificial Sequence: Synthetic primer
cccccccaaaaatatatatgtatgtcgatatataatatag

SEQ ID NO: 29843 - DNA, 40 bp, Artificial Sequence
  Description of Artificial Sequence: Synthetic primer
caaatgagacaagaaagtgtacagtgcaaaggaagaagtg

SEQ ID NO: 29844 - DNA, 40 bp, Artificial Sequence
  Description of Artificial Sequence: Synthetic primer
tgctagccgcagggaagtgtcgcttctcgcctcggctctc

SEQ ID NO: 29845 - DNA, 40 bp, Artificial Sequence
  Description of Artificial Sequence: Synthetic primer
gctaaccagcccagggtcttgtgaccacgactccttttac

SEQ ID NO: 29846 - DNA, 40 bp, Artificial Sequence
  Description of Artificial Sequence: Synthetic primer
caattttttctggacatctataagtttttctggattgatt

SEQ ID NO: 29847 - DNA, 40 bp, Artificial Sequence
  Description of Artificial Sequence: Synthetic primer
tcctgaagaccaaacactcgtcatccacattccttgaatg

SEQ ID NO: 29848 - DNA, 40 bp, Artificial Sequence
  Description of Artificial Sequence: Synthetic primer
ttctcggaaatgagaaagctggaatcctggtccccagcag

SEQ ID NO: 29849 - DNA, 40 bp, Artificial Sequence
  Description of Artificial Sequence: Synthetic primer
tccctcagggagattcaggcagctcaacgaggaactggag

SEQ ID NO: 29850 - DNA, 40 bp, Artificial Sequence
  Description of Artificial Sequence: Synthetic primer
ccccaggaaaagcaaatatttctgagaagattaataagag

SEQ ID NO: 29851 - DNA, 40 bp, Artificial Sequence
  Description of Artificial Sequence: Synthetic primer
cccagcacagagtcctgcctcctgggctgggcctccttcc

SEQ ID NO: 29852 - DNA, 40 bp, Artificial Sequence
  Description of Artificial Sequence: Synthetic primer
tgatgcttttgtgcgagaagaccttgcccgccgggtgaac

SEQ ID NO: 29853 - DNA, 40 bp, Artificial Sequence
  Description of Artificial Sequence: Synthetic primer
cggccgactgctgcccgatcactcctgaggccgccgttgg

SEQ ID NO: 29854 - DNA, 40 bp, Artificial Sequence
  Description of Artificial Sequence: Synthetic primer
tgctaaaatacaaattgcaatgagatagtttggtgttttt

SEQ ID NO: 29855 - DNA, 40 bp, Artificial Sequence
  Description of Artificial Sequence: Synthetic primer
ccttgtcatttatttccttcttgtattcttgttcaaggtg

SEQ ID NO: 29856 - DNA, 40 bp, Artificial Sequence
  Description of Artificial Sequence: Synthetic primer
aaagaatctcctgtctctgctggaaatgatgcctatgttg

SEQ ID NO: 29857 - DNA, 40 bp, Artificial Sequence
  Description of Artificial Sequence: Synthetic primer
attccatcatgttattcgtttcacatttccttttgctcag

SEQ ID NO: 29858 - DNA, 40 bp, Artificial Sequence
  Description of Artificial Sequence: Synthetic primer
cagggcagagaaccatcttatgccagacagctgttccaag

SEQ ID NO: 29859 - DNA, 40 bp, Artificial Sequence
  Description of Artificial Sequence: Synthetic primer
gacagagtgaatggcccatgactgttcagtacagaaggaa

SEQ ID NO: 29860 - DNA, 40 bp, Artificial Sequence
  Description of Artificial Sequence: Synthetic primer
tctgtaggacgtggccttcagttgactccaggaataggtg

SEQ ID NO: 29861 - DNA, 40 bp, Artificial Sequence
  Description of Artificial Sequence: Synthetic primer
gggattccagccaggctcacagtgggtagcataatatttc

SEQ ID NO: 29862 - DNA, 40 bp, Artificial Sequence
  Description of Artificial Sequence: Synthetic primer
aagcgttttgagaaacagaaagaggtgatcgagggctacc

SEQ ID NO: 29863 - DNA, 40 bp, Artificial Sequence
  Description of Artificial Sequence: Synthetic primer
acttcctgcaggactccaaggtcattttcgtggagaaagc

SEQ ID NO: 29864 - DNA, 40 bp, Artificial Sequence
  Description of Artificial Sequence: Synthetic primer
caggtttttgtggaactgaattcatatgcttaaaccactc

SEQ ID NO: 29865 - DNA, 40 bp, Artificial Sequence
  Description of Artificial Sequence: Synthetic primer
atcctagctcgtaatattccagaagataatgctgacatgg

SEQ ID NO: 29866 - DNA, 40 bp, Artificial Sequence
  Description of Artificial Sequence: Synthetic primer
tttttctgcacagcttttccaaaataaaaaccttccaaac

SEQ ID NO: 29867 - DNA, 40 bp, Artificial Sequence
  Description of Artificial Sequence: Synthetic primer
aggcagaaaaactgacacggtgggaggagggagatgaatg

SEQ ID NO: 29868 - DNA, 40 bp, Artificial Sequence
  Description of Artificial Sequence: Synthetic primer
acctctacaacttggccttcattggagaagttttagttgg

SEQ ID NO: 29869 - DNA, 40 bp, Artificial Sequence
  Description of Artificial Sequence: Synthetic primer
atgcctccttcgggagagacgcaggcgtgggcggcctgac

SEQ ID NO: 29870 - DNA, 40 bp, Artificial Sequence
  Description of Artificial Sequence: Synthetic primer
tttataaacaggaacctgtacagaagtgccctggaagaag

SEQ ID NO: 29871 - DNA, 40 bp, Artificial Sequence
  Description of Artificial Sequence: Synthetic primer
gagctggtgacagatgcttttggacatcgggcaccagacc

SEQ ID NO: 29872 - DNA, 40 bp, Artificial Sequence
  Description of Artificial Sequence: Synthetic primer
aatatcatcagtgtgcattaaatgagagaacactaacttc

SEQ ID NO: 29873 - DNA, 40 bp, Artificial Sequence
  Description of Artificial Sequence: Synthetic primer
cagaagtactccaggctgcaaattctgtgatggtggtatc

SEQ ID NO: 29874 - DNA, 40 bp, Artificial Sequence
  Description of Artificial Sequence: Synthetic primer
gaaaagaaacagatggttgcaaatgtggagaaacagcttg

SEQ ID NO: 29875 - DNA, 40 bp, Artificial Sequence
  Description of Artificial Sequence: Synthetic primer
ggataaccctacacccagaccccaggctggacatgctgac

SEQ ID NO: 29876 - DNA, 40 bp, Artificial Sequence
  Description of Artificial Sequence: Synthetic primer
gtcctgtgtgtctccccctcaaaaatgctggtgataagag

SEQ ID NO: 29877 - DNA, 40 bp, Artificial Sequence
  Description of Artificial Sequence: Synthetic primer
atgtgcctccttcaggaattcaatcttctcctggtctgtg

SEQ ID NO: 29878 - DNA, 40 bp, Artificial Sequence
  Description of Artificial Sequence: Synthetic primer
ctgctgttccggcatcgtgtctgggtgagggaacgtcaca

SEQ ID NO: 29879 - DNA, 40 bp, Artificial Sequence
  Description of Artificial Sequence: Synthetic primer
tctgcactgagcccaactctccggcgctctctccggttcg

SEQ ID NO: 29880 - DNA, 40 bp, Artificial Sequence
  Description of Artificial Sequence: Synthetic primer
catatcaaaatttcttatatctttggatcatgaatgtcag

SEQ ID NO: 29881 - DNA, 40 bp, Artificial Sequence
  Description of Artificial Sequence: Synthetic primer
attatgattcagcccttgcttcatatgtatgacttttatg

SEQ ID NO: 29882 - DNA, 40 bp, Artificial Sequence
  Description of Artificial Sequence: Synthetic primer
tgcggaatagctgctgggtttgagtctccttggctcattc

SEQ ID NO: 29883 - DNA, 40 bp, Artificial Sequence
  Description of Artificial Sequence: Synthetic primer
accatagttggtgtcatataaatagttctcgtctttccag

SEQ ID NO: 29884 - DNA, 40 bp, Artificial Sequence
  Description of Artificial Sequence: Synthetic primer
cccacaagcctttgtagctaatttcatcaatgcatatctc

SEQ ID NO: 29885 - DNA, 40 bp, Artificial Sequence
  Description of Artificial Sequence: Synthetic primer
cagtcctgaaagagacacatgatgagagagattctacagg

SEQ ID NO: 29886 - DNA, 40 bp, Artificial Sequence
  Description of Artificial Sequence: Synthetic primer
aacacagcgaatgtttcctaaatccttgcctttcacttcc

SEQ ID NO: 29887 - DNA, 40 bp, Artificial Sequence
  Description of Artificial Sequence: Synthetic primer
ataatgtccaatactgtggctactgtaaataccattttag

SEQ ID NO: 29888 - DNA, 40 bp, Artificial Sequence
  Description of Artificial Sequence: Synthetic primer
aggacagactcgaactcgtttctcttgcacattttcttgc

SEQ ID NO: 29889 - DNA, 40 bp, Artificial Sequence
  Description of Artificial Sequence: Synthetic primer
acatttagaatctgaaaggcaactaaaatgaggagagatg

SEQ ID NO: 29890 - DNA, 40 bp, Artificial Sequence
  Description of Artificial Sequence: Synthetic primer
agcctggtagacacgtaccgacagacaacctcacccagtg

SEQ ID NO: 29891 - DNA, 40 bp, Artificial Sequence
  Description of Artificial Sequence: Synthetic primer
atgccgtgaagctgggggtgcgaggaatgccaggcggaag

SEQ ID NO: 29892 - DNA, 40 bp, Artificial Sequence
  Description of Artificial Sequence: Synthetic primer
aggtttgagaatgctcctgattctgccaaaacaaaagctc

SEQ ID NO: 29893 - DNA, 40 bp, Artificial Sequence
  Description of Artificial Sequence: Synthetic primer
agcctggccttcggaacgctcctctgcattgccattgttc

SEQ ID NO: 29894 - DNA, 40 bp, Artificial Sequence
  Description of Artificial Sequence: Synthetic primer
caaaggcttggggggccggggcgcggctgtgcagctctcg

SEQ ID NO: 29895 - DNA, 40 bp, Artificial Sequence
  Description of Artificial Sequence: Synthetic primer
cttgtgggaaactgaggcccagcttggggaaggccaggac

SEQ ID NO: 29896 - DNA, 40 bp, Artificial Sequence
  Description of Artificial Sequence: Synthetic primer
ctgctggctgcaccagaaacagggccactgtgccgacagg

SEQ ID NO: 29897 - DNA, 40 bp, Artificial Sequence
  Description of Artificial Sequence: Synthetic primer
aaagccaggtgtgtctgtgtctggtgggtaagcaactgtg

SEQ ID NO: 29898 - DNA, 40 bp, Artificial Sequence
  Description of Artificial Sequence: Synthetic primer
gaaggcagcctaacgaggcacactgcccgcatagaccttc

SEQ ID NO: 29899 - DNA, 40 bp, Artificial Sequence
  Description of Artificial Sequence: Synthetic primer
cttgtggggcttgatggtctccgtgtgcatcttggagtgg

SEQ ID NO: 29900 - DNA, 40 bp, Artificial Sequence
  Description of Artificial Sequence: Synthetic primer
gaaggggggcaaagtccttgaacattttctttggctcgtg

SEQ ID NO: 29901 - DNA, 40 bp, Artificial Sequence
  Description of Artificial Sequence: Synthetic primer
acccaaaggtcctggagaaccagactcaccaactcctctg

SEQ ID NO: 29902 - DNA, 40 bp, Artificial Sequence
  Description of Artificial Sequence: Synthetic primer
ccctatttccctaaaacactcaggtgctttcagatttcag

SEQ ID NO: 29903 - DNA, 40 bp, Artificial Sequence
  Description of Artificial Sequence: Synthetic primer
ggcctgctgcttcaggccagccagttcttgatcctgttgc

SEQ ID NO: 29904 - DNA, 40 bp, Artificial Sequence
  Description of Artificial Sequence: Synthetic primer
tgctgatctgtggtctacagttatgtggtaactcatgttg

SEQ ID NO: 29905 - DNA, 40 bp, Artificial Sequence
  Description of Artificial Sequence: Synthetic primer
ccatgctgatcatgcagcgcctggaggctgaacgaagagc

SEQ ID NO: 29906 - DNA, 40 bp, Artificial Sequence
  Description of Artificial Sequence: Synthetic primer
ctatgtgctctgtactggaggctctgttctgcctcttatc

SEQ ID NO: 29907 - DNA, 40 bp, Artificial Sequence
  Description of Artificial Sequence: Synthetic primer
ccgatcctggtttgagcatctgctgcaacagtttattgtg

SEQ ID NO: 29908 - DNA, 40 bp, Artificial Sequence
  Description of Artificial Sequence: Synthetic primer
cactttgtagtggcagatcactgtttcacagcatattttc

SEQ ID NO: 29909 - DNA, 40 bp, Artificial Sequence
  Description of Artificial Sequence: Synthetic primer
gctccagactcaattagaacagctccaagaagaaacattc

SEQ ID NO: 29910 - DNA, 40 bp, Artificial Sequence
  Description of Artificial Sequence: Synthetic primer
gcatcagttagttaccatcatgaaccccaacgtgctaatg

SEQ ID NO: 29911 - DNA, 40 bp, Artificial Sequence
  Description of Artificial Sequence: Synthetic primer
catgcaagctttgtcggaagaggaccggaggctctggatg

SEQ ID NO: 29912 - DNA, 40 bp, Artificial Sequence
  Description of Artificial Sequence: Synthetic primer
tgctttgtattctgggctaagattcattaaaaactagctg

SEQ ID NO: 29913 - DNA, 40 bp, Artificial Sequence
  Description of Artificial Sequence: Synthetic primer
gtacatgagcagtaggatcaggaagacggcaaagaggatg

SEQ ID NO: 29914 - DNA, 40 bp, Artificial Sequence
  Description of Artificial Sequence: Synthetic primer
tccttctgaacaaaatggctgtcttcacctactcttcttg

SEQ ID NO: 29915 - DNA, 40 bp, Artificial Sequence
  Description of Artificial Sequence: Synthetic primer
gttgcagctgttgcagtcccccagatacctattattttac

SEQ ID NO: 29916 - DNA, 40 bp, Artificial Sequence
  Description of Artificial Sequence: Synthetic primer
agccgggaggacaggctggctagcatctatgaggaggttg

SEQ ID NO: 29917 - DNA, 40 bp, Artificial Sequence
  Description of Artificial Sequence: Synthetic primer
atcatgtgtaaaaggtgccattttcccctctgaaacaatc

SEQ ID NO: 29918 - DNA, 40 bp, Artificial Sequence
  Description of Artificial Sequence: Synthetic primer
attctgtttacatgaaatggggagaaagtcaccgaaatgg

SEQ ID NO: 29919 - DNA, 40 bp, Artificial Sequence
  Description of Artificial Sequence: Synthetic primer
aatgtactcagtgaaggggtgcaggggcttgaccacatag

SEQ ID NO: 29920 - DNA, 40 bp, Artificial Sequence
  Description of Artificial Sequence: Synthetic primer
gcacctgaatagcttgcatgaggctggtacagcaaccaag

SEQ ID NO: 29921 - DNA, 40 bp, Artificial Sequence
  Description of Artificial Sequence: Synthetic primer
ggtaggaaatggcagcgccaagtcctcctgtgcagacctc

SEQ ID NO: 29922 - DNA, 40 bp, Artificial Sequence
  Description of Artificial Sequence: Synthetic primer
ggcccaggagggcataacttcagggtcaggcacaacaatg

SEQ ID NO: 29923 - DNA, 40 bp, Artificial Sequence
  Description of Artificial Sequence: Synthetic primer
tcgccaagtgggaaggtggtttatttttcttgctttttgg

SEQ ID NO: 29924 - DNA, 40 bp, Artificial Sequence
  Description of Artificial Sequence: Synthetic primer
gcacgggtgccaggggtgagagcagggtccgggggcagtc

SEQ ID NO: 29925 - DNA, 40 bp, Artificial Sequence
  Description of Artificial Sequence: Synthetic primer
gatgaggtcttaatcatggaacatttgaagtcacgtaaag

SEQ ID NO: 29926 - DNA, 40 bp, Artificial Sequence
  Description of Artificial Sequence: Synthetic primer
ttggatttcctttggagcagaggtgtgtccggtatccttg

SEQ ID NO: 29927 - DNA, 40 bp, Artificial Sequence
  Description of Artificial Sequence: Synthetic primer
tagaagaaattgaattattttctaaagacagatacataag

SEQ ID NO: 29928 - DNA, 40 bp, Artificial Sequence
  Description of Artificial Sequence: Synthetic primer
gcaggcaggggctgctggcacactcgtctgtgttgacctc

SEQ ID NO: 29929 - DNA, 40 bp, Artificial Sequence
  Description of Artificial Sequence: Synthetic primer
gtgtcaggatcaatgggacttggtgtattgcggtttgctg

SEQ ID NO: 29930 - DNA, 40 bp, Artificial Sequence
  Description of Artificial Sequence: Synthetic primer
gtggtgctgccccatcagcccctggcgacctacaccacag

SEQ ID NO: 29931 - DNA, 40 bp, Artificial Sequence
  Description of Artificial Sequence: Synthetic primer
aacgagttctaattgatcttctctgttgcttcttttctac

SEQ ID NO: 29932 - DNA, 40 bp, Artificial Sequence
  Description of Artificial Sequence: Synthetic primer
gtgggaacatgacttctttcggctgagctttcttacattc

SEQ ID NO: 29933 - DNA, 40 bp, Artificial Sequence
  Description of Artificial Sequence: Synthetic primer
gctcagtctcagcagaacacttcactgcaagctctagttc

SEQ ID NO: 29934 - DNA, 40 bp, Artificial Sequence
  Description of Artificial Sequence: Synthetic primer
ttgtcagctcatttgcagcttacgtttactggtttcttcc

SEQ ID NO: 29935 - DNA, 40 bp, Artificial Sequence
  Description of Artificial Sequence: Synthetic primer
ttggggtggaagactaataaaggaaagaaacgaaggagag

SEQ ID NO: 29936 - DNA, 40 bp, Artificial Sequence
  Description of Artificial Sequence: Synthetic primer
tgctccaggtccatctgggcagagggggcaggcgctggag

SEQ ID NO: 29937 - DNA, 40 bp, Artificial Sequence
  Description of Artificial Sequence: Synthetic primer
catggccgatggcggggccgaggaagaagaggaccgcaag

SEQ ID NO: 29938 - DNA, 40 bp, Artificial Sequence
  Description of Artificial Sequence: Synthetic primer
gtggagcagctagaggtatttcagagagagcaaactaagc

SEQ ID NO: 29939 - DNA, 40 bp, Artificial Sequence
  Description of Artificial Sequence: Synthetic primer
gcagaagggagaggggagcgaccctggggaccgactctgg

SEQ ID NO: 29940 - DNA, 40 bp, Artificial Sequence
  Description of Artificial Sequence: Synthetic primer
tctttcagatgttcagggagtatttcaacaatcctgtttc

SEQ ID NO: 29941 - DNA, 40 bp, Artificial Sequence
  Description of Artificial Sequence: Synthetic primer
caggcagggcccccatggtcagaaccctgctagagccatc

SEQ ID NO: 29942 - DNA, 40 bp, Artificial Sequence
  Description of Artificial Sequence: Synthetic primer
gctgcgtgcctcctcactggcggcggtactgccagactcc

SEQ ID NO: 29943 - DNA, 40 bp, Artificial Sequence
  Description of Artificial Sequence: Synthetic primer
tcatagcagaagctactcagagaaatattgcatattgtgg

SEQ ID NO: 29944 - DNA, 40 bp, Artificial Sequence
  Description of Artificial Sequence: Synthetic primer
caggataggggtttccccctagggtcacgatctcccacag

SEQ ID NO: 29945 - DNA, 40 bp, Artificial Sequence
  Description of Artificial Sequence: Synthetic primer
tgtagtagttgatgcattccggagcgtaccacttgacagg

SEQ ID NO: 29946 - DNA, 40 bp, Artificial Sequence
  Description of Artificial Sequence: Synthetic primer
tgcagaatctccagcttggcagccttctccttctccagtg

SEQ ID NO: 29947 - DNA, 40 bp, Artificial Sequence
  Description of Artificial Sequence: Synthetic primer
tgccgaaaatgaaataatgagattgagtagtttaaaccag

SEQ ID NO: 29948 - DNA, 40 bp, Artificial Sequence
  Description of Artificial Sequence: Synthetic primer
ccaagccatcatcttggtagaaaatgggacttattccttg

SEQ ID NO: 29949 - DNA, 40 bp, Artificial Sequence
  Description of Artificial Sequence: Synthetic primer
tcaaattaatctcttgtgtgtctgcataaacttgaacaac

SEQ ID NO: 29950 - DNA, 40 bp, Artificial Sequence
  Description of Artificial Sequence: Synthetic primer
tttttgctggagggacagctggttccactttttcttgatg

SEQ ID NO: 29951 - DNA, 40 bp, Artificial Sequence
  Description of Artificial Sequence: Synthetic primer
gctccctggggcacaaggtctacagcctgctgttcgcaga

SEQ ID NO: 29952 - DNA, 40 bp, Artificial Sequence
  Description of Artificial Sequence: Synthetic primer
caccatgttctggagagcggccctgccaagcacccacatc

SEQ ID NO: 29953 - DNA, 40 bp, Artificial Sequence
  Description of Artificial Sequence: Synthetic primer
cagttgtaccagactttggataaggtctgcccagaacgag

SEQ ID NO: 29954 - DNA, 40 bp, Artificial Sequence
  Description of Artificial Sequence: Synthetic primer
ggcggtgcactcggccttgatgtggaactgtaataatatg

SEQ ID NO: 29955 - DNA, 40 bp, Artificial Sequence
  Description of Artificial Sequence: Synthetic primer
acatctaactgttctgtaagtcttgatgctgaatccaatg

SEQ ID NO: 29956 - DNA, 40 bp, Artificial Sequence
  Description of Artificial Sequence: Synthetic primer
gatgattatcattgcccgcccagcacgtctcctggaatgc

SEQ ID NO: 29957 - DNA, 40 bp, Artificial Sequence
  Description of Artificial Sequence: Synthetic primer
tgggtgtcagtgaggccactgccatccattcgtaacttcc

SEQ ID NO: 29958 - DNA, 40 bp, Artificial Sequence
  Description of Artificial Sequence: Synthetic primer
attgggaagtgggcaccctcctccctcgccaagggcaatg

SEQ ID NO: 29959 - DNA, 40 bp, Artificial Sequence
  Description of Artificial Sequence: Synthetic primer
ttccacactagtgtccaccaccagtccattcacactcctg

SEQ ID NO: 29960 - DNA, 40 bp, Artificial Sequence
  Description of Artificial Sequence: Synthetic primer
gcacaccccagacgccgcagccccctgcccagccccaacc

SEQ ID NO: 29961 - DNA, 40 bp, Artificial Sequence
  Description of Artificial Sequence: Synthetic primer
cttttcagagaaaagactgaatttacactggtactgttag

SEQ ID NO: 29962 - DNA, 40 bp, Artificial Sequence
  Description of Artificial Sequence: Synthetic primer
gtggcacggcgagcacttgctgactaacgacgtcaaaatc

SEQ ID NO: 29963 - DNA, 40 bp, Artificial Sequence
  Description of Artificial Sequence: Synthetic primer
tcccccaaccttcctgattgcatctctattttaaatgacc

SEQ ID NO: 29964 - DNA, 40 bp, Artificial Sequence
  Description of Artificial Sequence: Synthetic primer
ccttgttgtcgatgttaatcgcaaagagtatggagttcag

SEQ ID NO: 29965 - DNA, 40 bp, Artificial Sequence
  Description of Artificial Sequence: Synthetic primer
ctggtttgctgcgccaatggctggcaggtccgtggtggtg

SEQ ID NO: 29966 - DNA, 40 bp, Artificial Sequence
  Description of Artificial Sequence: Synthetic primer
caattaggttatgctatttggacaataaactcaccttgac

SEQ ID NO: 29967 - DNA, 40 bp, Artificial Sequence
  Description of Artificial Sequence: Synthetic primer
aatcttcttcatcagacttttgacttatattaccagattc

SEQ ID NO: 29968 - DNA, 40 bp, Artificial Sequence
  Description of Artificial Sequence: Synthetic primer
aaagttcacatgagccacgttcttatacaactctttcctc

SEQ ID NO: 29969 - DNA, 40 bp, Artificial Sequence
  Description of Artificial Sequence: Synthetic primer
ccatatggctgaggtctcatcttgcccatctgatccattg

SEQ ID NO: 29970 - DNA, 40 bp, Artificial Sequence
  Description of Artificial Sequence: Synthetic primer
cgccttccccacagtgcccagcaggggtccagccaccaag

SEQ ID NO: 29971 - DNA, 40 bp, Artificial Sequence
  Description of Artificial Sequence: Synthetic primer
aggactgcccggtgcctccagtgagaagggccgaaagacc

SEQ ID NO: 29972 - DNA, 40 bp, Artificial Sequence
  Description of Artificial Sequence: Synthetic primer
gagtaggtatctgaagttccattggtcttcctgaattatg

SEQ ID NO: 29973 - DNA, 40 bp, Artificial Sequence
  Description of Artificial Sequence: Synthetic primer
atgcccatgggtctgcttgcatcgagtgtcaatgagtttg

SEQ ID NO: 29974 - DNA, 40 bp, Artificial Sequence
  Description of Artificial Sequence: Synthetic primer
caggtggaggacgagcgcaagatggccgagcagtacaagg

SEQ ID NO: 29975 - DNA, 40 bp, Artificial Sequence
  Description of Artificial Sequence: Synthetic primer
caagatctttgcaggagtttgccactgtcctcaggaatct

SEQ ID NO: 29976 - DNA, 40 bp, Artificial Sequence
  Description of Artificial Sequence: Synthetic primer
gggacctgccagcgacatgtctttccccacaatcatactg

SEQ ID NO: 29977 - DNA, 40 bp, Artificial Sequence
  Description of Artificial Sequence: Synthetic primer
catcacgaattacgtggttaccccttgcttcttcaagttc

SEQ ID NO: 29978 - DNA, 40 bp, Artificial Sequence
  Description of Artificial Sequence: Synthetic primer
aagaagctccaggtagccaccttctaggggccccaactcc

SEQ ID NO: 29979 - DNA, 40 bp, Artificial Sequence
  Description of Artificial Sequence: Synthetic primer
gcatcgccctccatgcctgcacaggccagaaacttcacac

SEQ ID NO: 29980 - DNA, 40 bp, Artificial Sequence
  Description of Artificial Sequence: Synthetic primer
cccggtccgaccacctgaagacccacaccaggactcatac

SEQ ID NO: 29981 - DNA, 40 bp, Artificial Sequence
  Description of Artificial Sequence: Synthetic primer
agcaagctcctcagttcggtgaaggaaatcagtgacatag

SEQ ID NO: 29982 - DNA, 40 bp, Artificial Sequence
  Description of Artificial Sequence: Synthetic primer
caccacctctgccactgtaagatattccaaaattcctttg

SEQ ID NO: 29983 - DNA, 40 bp, Artificial Sequence
  Description of Artificial Sequence: Synthetic primer
gggctcagagcctcgcagttgtgccaggattttcctatac

SEQ ID NO: 29984 - DNA, 40 bp, Artificial Sequence
  Description of Artificial Sequence: Synthetic primer
taaacagattgccctgggaacctccaaactcaattatctg

SEQ ID NO: 29985 - DNA, 40 bp, Artificial Sequence
  Description of Artificial Sequence: Synthetic primer
gcatttgcccctctggattggggagcctcgtgggactcag

SEQ ID NO: 29986 - DNA, 40 bp, Artificial Sequence
  Description of Artificial Sequence: Synthetic primer
tttttccttcattttgggcatctcgataatcaggattaag

SEQ ID NO: 29987 - DNA, 40 bp, Artificial Sequence
  Description of Artificial Sequence: Synthetic primer
tgttcataatgtcaagctgttgttctttaccgctcttttg

SEQ ID NO: 29988 - DNA, 40 bp, Artificial Sequence
  Description of Artificial Sequence: Synthetic primer
ctctcccaggataccctgagtgcagggaaatgggagagac

SEQ ID NO: 29989 - DNA, 40 bp, Artificial Sequence
  Description of Artificial Sequence: Synthetic primer
cctatggaaatccaggcagccaaggctatggacaagcatc

SEQ ID NO: 29990 - DNA, 40 bp, Artificial Sequence
  Description of Artificial Sequence: Synthetic primer
gtctccgacgtggacgtgggaacactggaaacgctgcagg

SEQ ID NO: 29991 - DNA, 40 bp, Artificial Sequence
  Description of Artificial Sequence: Synthetic primer
ccaggcaggcctccagcccctgggacccccagccacgatg

SEQ ID NO: 29992 - DNA, 40 bp, Artificial Sequence
  Description of Artificial Sequence: Synthetic primer
cacagtccaaggaatctttgctacatatatggcactgtag

SEQ ID NO: 29993 - DNA, 40 bp, Artificial Sequence
  Description of Artificial Sequence: Synthetic primer
ggaaatgaaaaagtaagtttgaaattagaagaaggaatac

SEQ ID NO: 29994 - DNA, 40 bp, Artificial Sequence
  Description of Artificial Sequence: Synthetic primer
acttcaactccctgctgagggttgaatctggaataaaatc

SEQ ID NO: 29995 - DNA, 40 bp, Artificial Sequence
  Description of Artificial Sequence: Synthetic primer
cggagcaccccatccctgacgacaaaggctgtgctcttgg

SEQ ID NO: 29996 - DNA, 40 bp, Artificial Sequence
  Description of Artificial Sequence: Synthetic primer
acccttagctacccacgatgtttcagacagtccccgacac

SEQ ID NO: 29997 - DNA, 40 bp, Artificial Sequence
  Description of Artificial Sequence: Synthetic primer
agagctggaattttaatactggttttctccaactgataac

SEQ ID NO: 29998 - DNA, 40 bp, Artificial Sequence
  Description of Artificial Sequence: Synthetic primer
aggcagaattagagaaactgaaacagcggataaacttcag

SEQ ID NO: 29999 - DNA, 40 bp, Artificial Sequence
  Description of Artificial Sequence: Synthetic primer
gcttcatgctgcagaacgaaccgctgccgcacagctgcaa

SEQ ID NO: 30000 - DNA, 40 bp, Artificial Sequence
  Description of Artificial Sequence: Synthetic primer
tgtggatccacagctcttacagcgaacacacttggtacag

SEQ ID NO: 30001 - DNA, 40 bp, Artificial Sequence
  Description of Artificial Sequence: Synthetic primer
acagaaatccattcactgggcttaaactatcaaatattgc

SEQ ID NO: 30002 - DNA, 40 bp, Artificial Sequence
  Description of Artificial Sequence: Synthetic primer
tgtccatttccccccagttaactgcttttccaacaaactc

SEQ ID NO: 30003 - DNA, 40 bp, Artificial Sequence
  Description of Artificial Sequence: Synthetic primer
tttgccggggtacaatagggggctgggccatgctcatctg

SEQ ID NO: 30004 - DNA, 40 bp, Artificial Sequence
  Description of Artificial Sequence: Synthetic primer
cgtcttcctgttcaccgacctgcttctctgcaccaagctc

SEQ ID NO: 30005 - DNA, 40 bp, Artificial Sequence
  Description of Artificial Sequence: Synthetic primer
gcaaatcagagcccttctatgtaaaggcatttagtagtcc

SEQ ID NO: 30006 - DNA, 40 bp, Artificial Sequence
  Description of Artificial Sequence: Synthetic primer
cgggggcgagcgcgcgtgtgtgtgagtgcgcgccggccag

SEQ ID NO: 30007 - DNA, 40 bp, Artificial Sequence
  Description of Artificial Sequence: Synthetic primer
tgtccatgtagtcaccattgttttcaaaagataaaataac

SEQ ID NO: 30008 - DNA, 40 bp, Artificial Sequence
  Description of Artificial Sequence: Synthetic primer
ctcgcaagtacaggtaattcttcgaggatgaggggcttcc

SEQ ID NO: 30009 - DNA, 40 bp, Artificial Sequence
  Description of Artificial Sequence: Synthetic primer
ggaggcggcgtgggccgtttgaatttgtcaggactgttgc

SEQ ID NO: 30010 - DNA, 40 bp, Artificial Sequence
  Description of Artificial Sequence: Synthetic primer
actcttccccctgtcttgatgttaagatttacaggtgctg

SEQ ID NO: 30011 - DNA, 40 bp, Artificial Sequence
  Description of Artificial Sequence: Synthetic primer
ggcctcggaaggccaggatagccgaggtctccgcgtaggt

SEQ ID NO: 30012 - DNA, 40 bp, Artificial Sequence
  Description of Artificial Sequence: Synthetic primer
taaaaataccagtagtgtgtgctttaactcaagaagaatc

SEQ ID NO: 30013 - DNA, 40 bp, Artificial Sequence
  Description of Artificial Sequence: Synthetic primer
ttacaagcaaattttctatttgacaaagcccttggtggag

SEQ ID NO: 30014 - DNA, 40 bp, Artificial Sequence
  Description of Artificial Sequence: Synthetic primer
acagcgcgatgctcttagcgcagctgaatgcctttctctc

SEQ ID NO: 30015 - DNA, 40 bp, Artificial Sequence
  Description of Artificial Sequence: Synthetic primer
tgcgttgcctggctccacgccctgctgggtcctacctgtc

SEQ ID NO: 30016 - DNA, 40 bp, Artificial Sequence
  Description of Artificial Sequence: Synthetic primer
ggaccaaaatgttcatcactgcagttactttctgctttcc

SEQ ID NO: 30017 - DNA, 40 bp, Artificial Sequence
  Description of Artificial Sequence: Synthetic primer
ctgaagtgcagatcgccgcagaggccccagtgcccggatg

SEQ ID NO: 30018 - DNA, 40 bp, Artificial Sequence
  Description of Artificial Sequence: Synthetic primer
atgctgatatatctgaccccaactcatcttctcttagttg

SEQ ID NO: 30019 - DNA, 40 bp, Artificial Sequence
  Description of Artificial Sequence: Synthetic primer
tttttatgaaatcttttctttcagttaaatcataagtagg

SEQ ID NO: 30020 - DNA, 40 bp, Artificial Sequence
  Description of Artificial Sequence: Synthetic primer
ttggggtcgtcgccctcgagatgattatcgtaggaggagt

SEQ ID NO: 30021 - DNA, 40 bp, Artificial Sequence
  Description of Artificial Sequence: Synthetic primer
gaggcccacgctcaccaggacgaccaggttttccagcttc

SEQ ID NO: 30022 - DNA, 40 bp, Artificial Sequence
  Description of Artificial Sequence: Synthetic primer
agaagtccgcatcatgaagggcctaaaccaccccaacatc

SEQ ID NO: 30023 - DNA, 40 bp, Artificial Sequence
  Description of Artificial Sequence: Synthetic primer
cagctctactcccctccaagtcccagttacaggactcatc

SEQ ID NO: 30024 - DNA, 40 bp, Artificial Sequence
  Description of Artificial Sequence: Synthetic primer
tatcttataagttttcaaacacacataagaatgaactctg

SEQ ID NO: 30025 - DNA, 40 bp, Artificial Sequence
  Description of Artificial Sequence: Synthetic primer
cacaaacacaacgttgccttccaggttcactacaaagaag

SEQ ID NO: 30026 - DNA, 40 bp, Artificial Sequence
  Description of Artificial Sequence: Synthetic primer
catggccaccaccccgctgctgggcctcagccccttgtcc

SEQ ID NO: 30027 - DNA, 40 bp, Artificial Sequence
  Description of Artificial Sequence: Synthetic primer
aagtgtttcaatgagatccaaggggagagcgtttctttgg

SEQ ID NO: 30028 - DNA, 40 bp, Artificial Sequence
  Description of Artificial Sequence: Synthetic primer
gggtgccatctaccacggtctggccacccttctcaatcag

SEQ ID NO: 30029 - DNA, 40 bp, Artificial Sequence
  Description of Artificial Sequence: Synthetic primer
tggaggcagaacttctcaaagttgctaacaaggagaaaac

SEQ ID NO: 30030 - DNA, 40 bp, Artificial Sequence
  Description of Artificial Sequence: Synthetic primer
accccgggccccctccgccctctccagctcccctctcctc

SEQ ID NO: 30031 - DNA, 40 bp, Artificial Sequence
  Description of Artificial Sequence: Synthetic primer
cagctcaccagatgagtttcaccgtgacctaagccacatc

SEQ ID NO: 30032 - DNA, 40 bp, Artificial Sequence
  Description of Artificial Sequence: Synthetic primer
gggcccatgttatcattttgttggctgaggaagtcaaaag

SEQ ID NO: 30033 - DNA, 40 bp, Artificial Sequence
  Description of Artificial Sequence: Synthetic primer
acaactattgcatatatagtgatgctacctgtcacattgc

SEQ ID NO: 30034 - DNA, 40 bp, Artificial Sequence
  Description of Artificial Sequence: Synthetic primer
ttccctagaccgcataacactccaaccgtgtaaatctcag

SEQ ID NO: 30035 - DNA, 40 bp, Artificial Sequence
  Description of Artificial Sequence: Synthetic primer
actccacttccccaccctggccgacctcatcgagcacatc

SEQ ID NO: 30036 - DNA, 40 bp, Artificial Sequence
  Description of Artificial Sequence: Synthetic primer
gctgaagcaactgcagaaagaggagaagcttcggaaacag

SEQ ID NO: 30037 - DNA, 40 bp, Artificial Sequence
  Description of Artificial Sequence: Synthetic primer
cagtgtgactgatggtttcagagtggtttggcattgtgtc

SEQ ID NO: 30038 - DNA, 40 bp, Artificial Sequence
  Description of Artificial Sequence: Synthetic primer
gtccactgatggcactaatgaccgagctggggagggagtc

SEQ ID NO: 30039 - DNA, 40 bp, Artificial Sequence
  Description of Artificial Sequence: Synthetic primer
agtgcacagtaaaagagttggcagtaatatcagaaaagtc

SEQ ID NO: 30040 - DNA, 40 bp, Artificial Sequence
  Description of Artificial Sequence: Synthetic primer
gttttatgacattctctacttggttatagtcttgagatac

SEQ ID NO: 30041 - DNA, 40 bp, Artificial Sequence
  Description of Artificial Sequence: Synthetic primer
agattgcatgaatggcttcaatttcctttgtcctagaatc

SEQ ID NO: 30042 - DNA, 40 bp, Artificial Sequence
  Description of Artificial Sequence: Synthetic primer
ggacaaagtcaaatcgatcacacacaatgataagtggtag

SEQ ID NO: 30043 - DNA, 40 bp, Artificial Sequence
  Description of Artificial Sequence: Synthetic primer
tgcagtactctttgctactgatattgcagccaggggtctg

SEQ ID NO: 30044 - DNA, 40 bp, Artificial Sequence
  Description of Artificial Sequence: Synthetic primer
ccttcacgtgcaccagcagctcctcacctggctcaatgtc

SEQ ID NO: 30045 - DNA, 40 bp, Artificial Sequence
  Description of Artificial Sequence: Synthetic primer
gaggcttccggcctggcagaagggcgctttccacccactc

SEQ ID NO: 30046 - DNA, 40 bp, Artificial Sequence
  Description of Artificial Sequence: Synthetic primer
cgggctggcccgggacgtgcacaacctcgactactacaag

SEQ ID NO: 30047 - DNA, 40 bp, Artificial Sequence
  Description of Artificial Sequence: Synthetic primer
tgccctggggcccaaggagaagcagaagtaccacgacctg

SEQ ID NO: 30048 - DNA, 40 bp, Artificial Sequence
  Description of Artificial Sequence: Synthetic primer
aattagttctctgaatctttgcaaaacatctccttcactg

SEQ ID NO: 30049 - DNA, 40 bp, Artificial Sequence
  Description of Artificial Sequence: Synthetic primer
caaaaatcaagggagactgtcttttggcttttaatttttc

SEQ ID NO: 30050 - DNA, 40 bp, Artificial Sequence
  Description of Artificial Sequence: Synthetic primer
cctcactccccggccgagggctacccacgcaggacagtcg

SEQ ID NO: 30051 - DNA, 40 bp, Artificial Sequence
  Description of Artificial Sequence: Synthetic primer
cctttcaaaagacgaggctattggtactttatgccaccac

SEQ ID NO: 30052 - DNA, 40 bp, Artificial Sequence
  Description of Artificial Sequence: Synthetic primer
cccagtggccatcgggagaagctcatagattggcttttag

SEQ ID NO: 30053 - DNA, 40 bp, Artificial Sequence
  Description of Artificial Sequence: Synthetic primer
aagggtagtcctccgctagccacgtcacctaatgctcacg

SEQ ID NO: 30054 - DNA, 40 bp, Artificial Sequence
  Description of Artificial Sequence: Synthetic primer
ccaacaaaaacccattcagctcggccagtgggggctttgg

SEQ ID NO: 30055 - DNA, 40 bp, Artificial Sequence
  Description of Artificial Sequence: Synthetic primer
cttctcagacggggatgtctttggcccagagctggacacc

SEQ ID NO: 30056 - DNA, 40 bp, Artificial Sequence
  Description of Artificial Sequence: Synthetic primer
ctcggagtctcagtgataaatacttcgacaggaccacttg

SEQ ID NO: 30057 - DNA, 40 bp, Artificial Sequence
  Description of Artificial Sequence: Synthetic primer
ctgcccttttgttctgctgaaggagcacagagaacatttg

SEQ ID NO: 30058 - DNA, 40 bp, Artificial Sequence
  Description of Artificial Sequence: Synthetic primer
ggcagatcttgatttgtaatagtcccaaatatcattgcag

SEQ ID NO: 30059 - DNA, 40 bp, Artificial Sequence
  Description of Artificial Sequence: Synthetic primer
aaaagcttttcttgaagtcaacagaccccaaatccataag

SEQ ID NO: 30060 - DNA, 40 bp, Artificial Sequence
  Description of Artificial Sequence: Synthetic primer
cccctgcaccctgcctggggccctggggtgtggagcagtg

SEQ ID NO: 30061 - DNA, 40 bp, Artificial Sequence
  Description of Artificial Sequence: Synthetic primer
ccagctataaaatcgcagttttctttctccctttttaatc

SEQ ID NO: 30062 - DNA, 40 bp, Artificial Sequence
  Description of Artificial Sequence: Synthetic primer
gttggctcccacgatgtaacccgtgacgtcgaagttgatg

SEQ ID NO: 30063 - DNA, 40 bp, Artificial Sequence
  Description of Artificial Sequence: Synthetic primer
gtcaatgcgcagagtgcagcatgcattatagatattctgg

SEQ ID NO: 30064 - DNA, 40 bp, Artificial Sequence
  Description of Artificial Sequence: Synthetic primer
cagccagagggtggaaggatatacaatgtggaggaaacac

SEQ ID NO: 30065 - DNA, 40 bp, Artificial Sequence
  Description of Artificial Sequence: Synthetic primer
ccccttggtctccaggaaggagaagaagcagcgttgtagc

SEQ ID NO: 30066 - DNA, 40 bp, Artificial Sequence
  Description of Artificial Sequence: Synthetic primer
atggcccagatggacgtgcaaagcccttggaattttctgg

SEQ ID NO: 30067 - DNA, 40 bp, Artificial Sequence
  Description of Artificial Sequence: Synthetic primer
caaatatgggtgggccaatgcagagaatgactcctccaag

SEQ ID NO: 30068 - DNA, 40 bp, Artificial Sequence
  Description of Artificial Sequence: Synthetic primer
cataaaaataatttttgcttaaatagtaactcatggtttt

SEQ ID NO: 30069 - DNA, 40 bp, Artificial Sequence
  Description of Artificial Sequence: Synthetic primer
agtgtgatcgctgggtccattccaaatgtgagaatctttc

SEQ ID NO: 30070 - DNA, 40 bp, Artificial Sequence
  Description of Artificial Sequence: Synthetic primer
ataagccaaggtgatgctgggtgccccgaggcagaacaag

SEQ ID NO: 30071 - DNA, 40 bp, Artificial Sequence
  Description of Artificial Sequence: Synthetic primer
tcagggccagagcccctgcaccctgtttgggctggtgagc

SEQ ID NO: 30072 - DNA, 40 bp, Artificial Sequence
  Description of Artificial Sequence: Synthetic primer
tgatttttaaacatttcatttatagttatttttagtattg

SEQ ID NO: 30073 - DNA, 40 bp, Artificial Sequence
  Description of Artificial Sequence: Synthetic primer
catggggtcagggtcattagagttgaggtcatagctaccc

SEQ ID NO: 30074 - DNA, 40 bp, Artificial Sequence
  Description of Artificial Sequence: Synthetic primer
gagtacgtcaaccgctgtctgttcataaaatcttcacttc

SEQ ID NO: 30075 - DNA, 40 bp, Artificial Sequence
  Description of Artificial Sequence: Synthetic primer
ctggctgaggagggaaggggtggcagggttcagacagttg

SEQ ID NO: 30076 - DNA, 40 bp, Artificial Sequence
  Description of Artificial Sequence: Synthetic primer
acctgtatgaaaatcacacagacaagaaaacaaacaaatc

SEQ ID NO: 30077 - DNA, 40 bp, Artificial Sequence
  Description of Artificial Sequence: Synthetic primer
taagaaatgactctttacttcaaactctgagccctgattc

SEQ ID NO: 30078 - DNA, 40 bp, Artificial Sequence
  Description of Artificial Sequence: Synthetic primer
tagccagctttaatcccccggggctccccaggctcgtgtc

SEQ ID NO: 30079 - DNA, 40 bp, Artificial Sequence
  Description of Artificial Sequence: Synthetic primer
ttgaggagagtggtctttgttgggtccaattttgagttgc

SEQ ID NO: 30080 - DNA, 40 bp, Artificial Sequence
  Description of Artificial Sequence: Synthetic primer
ggccctcaatattccatgatgcagccacacctccaaagac

SEQ ID NO: 30081 - DNA, 40 bp, Artificial Sequence
  Description of Artificial Sequence: Synthetic primer
gcgtggcagatggctacaggtgttaggcaaataacagcac

SEQ ID NO: 30082 - DNA, 40 bp, Artificial Sequence
  Description of Artificial Sequence: Synthetic primer
cgagctgggcaatggcagggagctgtgtggctgcatcgag

SEQ ID NO: 30083 - DNA, 40 bp, Artificial Sequence
  Description of Artificial Sequence: Synthetic primer
tgaagtgcttcaggcttggctcattctgacacctaagaag

SEQ ID NO: 30084 - DNA, 40 bp, Artificial Sequence
  Description of Artificial Sequence: Synthetic primer
acccagccacggtgccgttgccttgggggtccttcttatc

SEQ ID NO: 30085 - DNA, 40 bp, Artificial Sequence
  Description of Artificial Sequence: Synthetic primer
attatgtttaataagaaagaaaatgccttggttcagatgg

SEQ ID NO: 30086 - DNA, 40 bp, Artificial Sequence
  Description of Artificial Sequence: Synthetic primer
tcacatgtggcaaatgtaaaaagaagaattgcacttacac

SEQ ID NO: 30087 - DNA, 40 bp, Artificial Sequence
  Description of Artificial Sequence: Synthetic primer
agcaagctgaagctgagcagaagcaggcagaagaaagaag

SEQ ID NO: 30088 - DNA, 40 bp, Artificial Sequence
  Description of Artificial Sequence: Synthetic primer
ctcggaaggctggctgggcatggacgttcggggcatgctg

SEQ ID NO: 30089 - DNA, 40 bp, Artificial Sequence
  Description of Artificial Sequence: Synthetic primer
ggcaggggaggacttggtgtcagctctccgagatttttac

SEQ ID NO: 30090 - DNA, 40 bp, Artificial Sequence
  Description of Artificial Sequence: Synthetic primer
gcctggtagtcgtgtgcgggtccatctaccagggcttctg

SEQ ID NO: 30091 - DNA, 40 bp, Artificial Sequence
  Description of Artificial Sequence: Synthetic primer
atcagctgggggtctgtgggttcctcctcctgggctcctc

SEQ ID NO: 30092 - DNA, 40 bp, Artificial Sequence
  Description of Artificial Sequence: Synthetic primer
tttttcaaatggaaagccactgaactgacccacattcttc

SEQ ID NO: 30093 - DNA, 40 bp, Artificial Sequence
  Description of Artificial Sequence: Synthetic primer
acccacctccacacttaccagccgacgtagaccccaaaac

SEQ ID NO: 30094 - DNA, 40 bp, Artificial Sequence
  Description of Artificial Sequence: Synthetic primer
caggaatcgggccgggggttgggccaggctctgaggtgtg

SEQ ID NO: 30095 - DNA, 40 bp, Artificial Sequence
  Description of Artificial Sequence: Synthetic primer
aatgttggggagggggcagaggaattccagagttcaaaac

SEQ ID NO: 30096 - DNA, 40 bp, Artificial Sequence
  Description of Artificial Sequence: Synthetic primer
gcaccgcgcggtggcaggagttagcacctggagacgacag

SEQ ID NO: 30097 - DNA, 40 bp, Artificial Sequence
  Description of Artificial Sequence: Synthetic primer
tggctacttttgctttatacaaccaaggaacacatcttag

SEQ ID NO: 30098 - DNA, 40 bp, Artificial Sequence
  Description of Artificial Sequence: Synthetic primer
gcaacagagcagtactattccatctctagcaatctcaaac

SEQ ID NO: 30099 - DNA, 40 bp, Artificial Sequence
  Description of Artificial Sequence: Synthetic primer
gctggtttacagatgttttccactgagcatcacaataaag

SEQ ID NO: 30100 - DNA, 40 bp, Artificial Sequence
  Description of Artificial Sequence: Synthetic primer
tacatgtaaatatagtcaatgtccctcagccagctgccgc

SEQ ID NO: 30101 - DNA, 40 bp, Artificial Sequence
  Description of Artificial Sequence: Synthetic primer
atcagtctggggctgatgaggtaccccaccgtggttggtc

SEQ ID NO: 30102 - DNA, 40 bp, Artificial Sequence
  Description of Artificial Sequence: Synthetic primer
ggaagaacaaatgaggcgccaaagagaggaaagttacagc

SEQ ID NO: 30103 - DNA, 40 bp, Artificial Sequence
  Description of Artificial Sequence: Synthetic primer
ctgcatggtttatgatctctataaaaccctcacacccatc

SEQ ID NO: 30104 - DNA, 40 bp, Artificial Sequence
  Description of Artificial Sequence: Synthetic primer
tctgaaaggctctccttgcagctgcttagacgctggattt

SEQ ID NO: 30105 - DNA, 40 bp, Artificial Sequence
  Description of Artificial Sequence: Synthetic primer
gggcttcttgcgcagttgggcgcgatgccccagctctaac

SEQ ID NO: 30106 - DNA, 40 bp, Artificial Sequence
  Description of Artificial Sequence: Synthetic primer
ggggggttttgtgtgttggcaaaagagctactcagaaatg

SEQ ID NO: 30107 - DNA, 40 bp, Artificial Sequence
  Description of Artificial Sequence: Synthetic primer
gaggaggagctgaagaatgtcaccaacaacctcaagtctc

SEQ ID NO: 30108 - DNA, 40 bp, Artificial Sequence
  Description of Artificial Sequence: Synthetic primer
ggaaagaagagttggagtgagatgaaggaaggactatgac

SEQ ID NO: 30109 - DNA, 40 bp, Artificial Sequence
  Description of Artificial Sequence: Synthetic primer
acgatgttccgcccattgaccctcacagacatctcaacag

SEQ ID NO: 30110 - DNA, 40 bp, Artificial Sequence
  Description of Artificial Sequence: Synthetic primer
ggaccagcaggaccagcatctcccttggcaccatccaaac

SEQ ID NO: 30111 - DNA, 40 bp, Artificial Sequence
  Description of Artificial Sequence: Synthetic primer
gatggctacaggtgatctggaccaagatggaaggatcagc

SEQ ID NO: 30112 - DNA, 40 bp, Artificial Sequence
  Description of Artificial Sequence: Synthetic primer
gtcttcaggatgacagaattctacaatattctttcctaag

SEQ ID NO: 30113 - DNA, 40 bp, Artificial Sequence
  Description of Artificial Sequence: Synthetic primer
ttttcctcacctgggcgcggtgccccagctccagcttcac

SEQ ID NO: 30114 - DNA, 40 bp, Artificial Sequence
  Description of Artificial Sequence: Synthetic primer
caaactcatctctgtcaagcattccatcatggtcaatatc

SEQ ID NO: 30115 - DNA, 40 bp, Artificial Sequence
  Description of Artificial Sequence: Synthetic primer
tgagaactttggaaagcttcctctaatgagactgggaagg

SEQ ID NO: 30116 - DNA, 40 bp, Artificial Sequence
  Description of Artificial Sequence: Synthetic primer
tagcacaatgtatggctccagttctgtgtatactctaata

SEQ ID NO: 30117 - DNA, 40 bp, Artificial Sequence
  Description of Artificial Sequence: Synthetic primer
gcaccaatgcagctgctcagtgtacccgccgtgggctgtc

SEQ ID NO: 30118 - DNA, 40 bp, Artificial Sequence
  Description of Artificial Sequence: Synthetic primer
tcgcttaggattgtcatttgtttccttgatgtgataatgc

SEQ ID NO: 30119 - DNA, 40 bp, Artificial Sequence
  Description of Artificial Sequence: Synthetic primer
tgacttcctcgggaaggactccatcagatactataacaag

SEQ ID NO: 30120 - DNA, 40 bp, Artificial Sequence
  Description of Artificial Sequence: Synthetic primer
atctggttttgatagtgcgtgttttcttctattaagtgag

SEQ ID NO: 30121 - DNA, 40 bp, Artificial Sequence
  Description of Artificial Sequence: Synthetic primer
ccagtgaattaatttcagcttatatgggtgtcttcatttg

SEQ ID NO: 30122 - DNA, 40 bp, Artificial Sequence
  Description of Artificial Sequence: Synthetic primer
ctgccccaaggtgtgtataatatgggcctttgtctttttg

SEQ ID NO: 30123 - DNA, 40 bp, Artificial Sequence
  Description of Artificial Sequence: Synthetic primer
aagctaaatgttgttccaaagcatcaagaagactgctagg

SEQ ID NO: 30124 - DNA, 40 bp, Artificial Sequence
  Description of Artificial Sequence: Synthetic primer
atgaggaaatccagttcgtcctgttcagagcacacttcag

SEQ ID NO: 30125 - DNA, 40 bp, Artificial Sequence
  Description of Artificial Sequence: Synthetic primer
gatccagctccaaaagtggctacattgttattattacttg

SEQ ID NO: 30126 - DNA, 40 bp, Artificial Sequence
  Description of Artificial Sequence: Synthetic primer
gagtgcttcagaaaagactgcaggaaatcagaaaacatac

SEQ ID NO: 30127 - DNA, 40 bp, Artificial Sequence
  Description of Artificial Sequence: Synthetic primer
gaagagaaacagttcacatcttgttcctgttgcctgcttc

SEQ ID NO: 30128 - DNA, 40 bp, Artificial Sequence
  Description of Artificial Sequence: Synthetic primer
gcaccgggagggagcttcgagggaagggggtatttacaag

SEQ ID NO: 30129 - DNA, 40 bp, Artificial Sequence
  Description of Artificial Sequence: Synthetic primer
aggcggcgctccggccccgcgctccctccctctgcctttc

SEQ ID NO: 30130 - DNA, 40 bp, Artificial Sequence
  Description of Artificial Sequence: Synthetic primer
gagatggagaagcatcaagacagctgatatggaggagatg

SEQ ID NO: 30131 - DNA, 40 bp, Artificial Sequence
  Description of Artificial Sequence: Synthetic primer
aatgcacccgcccctgaaatcggcagttttgggttattcc

SEQ ID NO: 30132 - DNA, 40 bp, Artificial Sequence
  Description of Artificial Sequence: Synthetic primer
aaccctcttgccattaagacccaaatcttgcattccacag

SEQ ID NO: 30133 - DNA, 40 bp, Artificial Sequence
  Description of Artificial Sequence: Synthetic primer
agcccgggcctcgtcccgcccacgcgtcacacggcaactc

SEQ ID NO: 30134 - DNA, 40 bp, Artificial Sequence
  Description of Artificial Sequence: Synthetic primer
taaataggtatctcaaaattttctttatcaggcacatcag

SEQ ID NO: 30135 - DNA, 40 bp, Artificial Sequence
  Description of Artificial Sequence: Synthetic primer
tcacttcttaactttctgttgccagatgtgtttaattcag

SEQ ID NO: 30136 - DNA, 40 bp, Artificial Sequence
  Description of Artificial Sequence: Synthetic primer
cactgtcattcctggtgatttgtcagaagtaagagatacc

SEQ ID NO: 30137 - DNA, 40 bp, Artificial Sequence
  Description of Artificial Sequence: Synthetic primer
aggtgggggtcctcctgcaccgcacatgcagaaccagatg

SEQ ID NO: 30138 - DNA, 40 bp, Artificial Sequence
  Description of Artificial Sequence: Synthetic primer
aaaaggcccgaagcgtctctgaaacagacattcagtcatc

SEQ ID NO: 30139 - DNA, 40 bp, Artificial Sequence
  Description of Artificial Sequence: Synthetic primer
cattgtgaagttgaccattgtgaagtttctgtccctttag

SEQ ID NO: 30140 - DNA, 40 bp, Artificial Sequence
  Description of Artificial Sequence: Synthetic primer
aatggtttttctgttcttcttctaccattttctttcttag

SEQ ID NO: 30141 - DNA, 40 bp, Artificial Sequence
  Description of Artificial Sequence: Synthetic primer
tgtctgagctcaggagtgtctgggctgcaacggacaggag

SEQ ID NO: 30142 - DNA, 40 bp, Artificial Sequence
  Description of Artificial Sequence: Synthetic primer
tgtgcacctgccacccatgccacccccggagccccagcag

SEQ ID NO: 30143 - DNA, 40 bp, Artificial Sequence
  Description of Artificial Sequence: Synthetic primer
cacccagacagcaggagaaacaggccatggaagacaacac

SEQ ID NO: 30144 - DNA, 40 bp, Artificial Sequence
  Description of Artificial Sequence: Synthetic primer
tttccaaacttctttccagataagggccctgccctacttc

SEQ ID NO: 30145 - DNA, 40 bp, Artificial Sequence
  Description of Artificial Sequence: Synthetic primer
agcagttctgattaactgccaagcccaggttgcctctcat

SEQ ID NO: 30146 - DNA, 40 bp, Artificial Sequence
  Description of Artificial Sequence: Synthetic primer
aaagtcattggcgtggtatgccacaggacagcggacacag

SEQ ID NO: 30147 - DNA, 40 bp, Artificial Sequence
  Description of Artificial Sequence: Synthetic primer
cgtacttggcagccttggcggcagctgctgcctgagcttc

SEQ ID NO: 30148 - DNA, 40 bp, Artificial Sequence
  Description of Artificial Sequence: Synthetic primer
agattccagatcacacatcacactctggggactcaggaac

SEQ ID NO: 30149 - DNA, 40 bp, Artificial Sequence
  Description of Artificial Sequence: Synthetic primer
ttcctgtacaccacttctcttgcaaactgtcttctatttc

SEQ ID NO: 30150 - DNA, 40 bp, Artificial Sequence
  Description of Artificial Sequence: Synthetic primer
atgttttctcatggccgagttatccctgaacatctttgtg

SEQ ID NO: 30151 - DNA, 40 bp, Artificial Sequence
  Description of Artificial Sequence: Synthetic primer
actgtagggggacggaccatcacctcctgctttgacttag

SEQ ID NO: 30152 - DNA, 40 bp, Artificial Sequence
  Description of Artificial Sequence: Synthetic primer
ctcatatttgtaaagataatagaattcataagtttcttag

SEQ ID NO: 30153 - DNA, 40 bp, Artificial Sequence
  Description of Artificial Sequence: Synthetic primer
aatttgtaggctttcctgttctcatcacaaaactgcaacc

SEQ ID NO: 30154 - DNA, 40 bp, Artificial Sequence
  Description of Artificial Sequence: Synthetic primer
tgatgactcaacgctgggaaagtcaaagacagaagttaag

SEQ ID NO: 30155 - DNA, 40 bp, Artificial Sequence
  Description of Artificial Sequence: Synthetic primer
tttttttggacaagggaaaatctgaaaatcttgtgatttc

SEQ ID NO: 30156 - DNA, 40 bp, Artificial Sequence
  Description of Artificial Sequence: Synthetic primer
ttattgattgggtgatgcagaaagccacaaatgagaaaag

SEQ ID NO: 30157 - DNA, 40 bp, Artificial Sequence
  Description of Artificial Sequence: Synthetic primer
ctttccccgcgtccgagaaggcggaaacccacagtgttac

SEQ ID NO: 30158 - DNA, 40 bp, Artificial Sequence
  Description of Artificial Sequence: Synthetic primer
aaaggcaatccctcgaagatctcttgccagcccgatcaac

SEQ ID NO: 30159 - DNA, 40 bp, Artificial Sequence
  Description of Artificial Sequence: Synthetic primer
tcttgtaggaactgtgtctttgagttactaattagtttat

SEQ ID NO: 30160 - DNA, 40 bp, Artificial Sequence
  Description of Artificial Sequence: Synthetic primer
caacatgttgaacagattcctccatcatcataatggcttg

SEQ ID NO: 30161 - DNA, 40 bp, Artificial Sequence
  Description of Artificial Sequence: Synthetic primer
ctacatgtctgactcaactcagaaaaagctggggagaagc

SEQ ID NO: 30162 - DNA, 40 bp, Artificial Sequence
  Description of Artificial Sequence: Synthetic primer
gctgcgggctggagcggcggcgggcaggcgtgcggaggac

SEQ ID NO: 30163 - DNA, 40 bp, Artificial Sequence
  Description of Artificial Sequence: Synthetic primer
cacagtgtggctgtttgtctccttgcccgccaaagttctg

SEQ ID NO: 30164 - DNA, 40 bp, Artificial Sequence
  Description of Artificial Sequence: Synthetic primer
ggatgggagggaaccaccataaccgcctgcctgccttttt

SEQ ID NO: 30165 - DNA, 40 bp, Artificial Sequence
  Description of Artificial Sequence: Synthetic primer
cctggccaggaggaaaatttcgaccatctgggatttttgg

SEQ ID NO: 30166 - DNA, 40 bp, Artificial Sequence
  Description of Artificial Sequence: Synthetic primer
gagatgaacctttcttagcctcagactgtttgtacttttg

SEQ ID NO: 30167 - DNA, 40 bp, Artificial Sequence
  Description of Artificial Sequence: Synthetic primer
ccacgacacaccagcttcccgtggccgaagccatgctgac

SEQ ID NO: 30168 - DNA, 40 bp, Artificial Sequence
  Description of Artificial Sequence: Synthetic primer
ggaacaaggccccatggaatccaaatctccttatacgatg

SEQ ID NO: 30169 - DNA, 40 bp, Artificial Sequence
  Description of Artificial Sequence: Synthetic primer
ggctcacgtccttgaggagaccaacccatccaggagacag

SEQ ID NO: 30170 - DNA, 40 bp, Artificial Sequence
  Description of Artificial Sequence: Synthetic primer
ccagctggccgactcgagttcagaaacaggaccacagagg

SEQ ID NO: 30171 - DNA, 40 bp, Artificial Sequence
  Description of Artificial Sequence: Synthetic primer
gggtgaatgaaacattgagggaagcaaagaaaagttcatc

SEQ ID NO: 30172 - DNA, 40 bp, Artificial Sequence
  Description of Artificial Sequence: Synthetic primer
cagagaagtaaatgcatatctttgcaactaacacttccag

SEQ ID NO: 30173 - DNA, 40 bp, Artificial Sequence
  Description of Artificial Sequence: Synthetic primer
gagcgcaagtcacacaaaatccccaaattagaaccagagg

SEQ ID NO: 30174 - DNA, 40 bp, Artificial Sequence
  Description of Artificial Sequence: Synthetic primer
gccgctgcagcacttgagctgctccgagaccttgctgctc

SEQ ID NO: 30175 - DNA, 40 bp, Artificial Sequence
  Description of Artificial Sequence: Synthetic primer
gtctatagtatttttcatatacaggattcccacttgataa

SEQ ID NO: 30176 - DNA, 40 bp, Artificial Sequence
  Description of Artificial Sequence: Synthetic primer
tgtcagagagagcgcggagagccgttctctgagctgcctg

SEQ ID NO: 30177 - DNA, 40 bp, Artificial Sequence
  Description of Artificial Sequence: Synthetic primer
cagcacccagcatctcctggcctggcctgaccgggcttcc

SEQ ID NO: 30178 - DNA, 40 bp, Artificial Sequence
  Description of Artificial Sequence: Synthetic primer
cccttttttcaatatctggcctcttctcctttccctacag

SEQ ID NO: 30179 - DNA, 40 bp, Artificial Sequence
  Description of Artificial Sequence: Synthetic primer
cagccacccctggtgaagaacatggggcctgggaaagtcc

SEQ ID NO: 30180 - DNA, 40 bp, Artificial Sequence
  Description of Artificial Sequence: Synthetic primer
caccccggctggaccacacctggacagtcagtttcttttc

SEQ ID NO: 30181 - DNA, 40 bp, Artificial Sequence
  Description of Artificial Sequence: Synthetic primer
tgacttcgtgatactttggacttctaaattaaatttatca

SEQ ID NO: 30182 - DNA, 40 bp, Artificial Sequence
  Description of Artificial Sequence: Synthetic primer
agtaaagcccacagagatctacaaccttggagcccagagc

SEQ ID NO: 30183 - DNA, 40 bp, Artificial Sequence
  Description of Artificial Sequence: Synthetic primer
gttccaagtactccaactcttgtggtgccacatcgtactg

SEQ ID NO: 30184 - DNA, 40 bp, Artificial Sequence
  Description of Artificial Sequence: Synthetic primer
tggataaacttcgtgagcagctttccacttcagaaaatgc

SEQ ID NO: 30185 - DNA, 40 bp, Artificial Sequence
  Description of Artificial Sequence: Synthetic primer
tatcattttcccaaatctagtatgctaagataaacaaatg

SEQ ID NO: 30186 - DNA, 40 bp, Artificial Sequence
  Description of Artificial Sequence: Synthetic primer
aacagacagatttgtcatgaagaaactcaatgatcgtgtc

SEQ ID NO: 30187 - DNA, 40 bp, Artificial Sequence
  Description of Artificial Sequence: Synthetic primer
gatcactttgtcgagcaaggatactaacttctgttgaagc

SEQ ID NO: 30188 - DNA, 40 bp, Artificial Sequence
  Description of Artificial Sequence: Synthetic primer
gattccagagtttcatcacttctttctctccttcattaac

SEQ ID NO: 30189 - DNA, 40 bp, Artificial Sequence
  Description of Artificial Sequence: Synthetic primer
gccctcgcgccctcgcgccctcgcagcccagcgccttctc

SEQ ID NO: 30190 - DNA, 40 bp, Artificial Sequence
  Description of Artificial Sequence: Synthetic primer
tgtgttatctcccttactattaaactataaccctctcttg

SEQ ID NO: 30191 - DNA, 40 bp, Artificial Sequence
  Description of Artificial Sequence: Synthetic primer
cttggagcgcttaaacaggctggagaccctggccgccatt

SEQ ID NO: 30192 - DNA, 40 bp, Artificial Sequence
  Description of Artificial Sequence: Synthetic primer
cattacatcgttggctacaacctcccaagctatgagtacc

SEQ ID NO: 30193 - DNA, 40 bp, Artificial Sequence
  Description of Artificial Sequence: Synthetic primer
acttagcaagaagttatggaattccttttattgaaacatc

SEQ ID NO: 30194 - DNA, 40 bp, Artificial Sequence
  Description of Artificial Sequence: Synthetic primer
atttctgggggaggccctggcagcggctcctgtctctctg

SEQ ID NO: 30195 - DNA, 40 bp, Artificial Sequence
  Description of Artificial Sequence: Synthetic primer
acggcgtcctgccacaggctttcgaccagtttttcgagac

SEQ ID NO: 30196 - DNA, 40 bp, Artificial Sequence
  Description of Artificial Sequence: Synthetic primer
atgccccctgccccgcccggaggtgaaagcgggtgtgagg

SEQ ID NO: 30197 - DNA, 40 bp, Artificial Sequence
  Description of Artificial Sequence: Synthetic primer
tccagtcctcacaaatacagaaacaataactgaaattaac

SEQ ID NO: 30198 - DNA, 40 bp, Artificial Sequence
  Description of Artificial Sequence: Synthetic primer
tggtcatttccatggcatcattacaactagaatagaaaac

SEQ ID NO: 30199 - DNA, 40 bp, Artificial Sequence
  Description of Artificial Sequence: Synthetic primer
cttcaacactcttctcaagatatcaaaagagatgtaggac

SEQ ID NO: 30200 - DNA, 40 bp, Artificial Sequence
  Description of Artificial Sequence: Synthetic primer
ggcgctcagcctgcgcggtggtacagatgcttcactcaca

SEQ ID NO: 30201 - DNA, 40 bp, Artificial Sequence
  Description of Artificial Sequence: Synthetic primer
cgtgcaaatctgctcacaccctccattgtcctcacaccag

SEQ ID NO: 30202 - DNA, 40 bp, Artificial Sequence
  Description of Artificial Sequence: Synthetic primer
cgtctatgctcagcaaatgctgcttctctctcataaactg

SEQ ID NO: 30203 - DNA, 40 bp, Artificial Sequence
  Description of Artificial Sequence: Synthetic primer
taatgaacctcaacttgtaatatctttacatatgcttcac

SEQ ID NO: 30204 - DNA, 40 bp, Artificial Sequence
  Description of Artificial Sequence: Synthetic primer
ggggaggggacgctactcaacacttaatagaatcacaacg

SEQ ID NO: 30205 - DNA, 40 bp, Artificial Sequence
  Description of Artificial Sequence: Synthetic primer
ggcgctagtccggctggagccgtcgggaccatggtgttgg

SEQ ID NO: 30206 - DNA, 40 bp, Artificial Sequence
  Description of Artificial Sequence: Synthetic primer
gctacctctccttcagtcccagaagacaagtctcaccaac

SEQ ID NO: 30207 - DNA, 40 bp, Artificial Sequence
  Description of Artificial Sequence: Synthetic primer
aaaaaaaccaggaagcagatgtccaggaagtgaaggcaag

SEQ ID NO: 30208 - DNA, 40 bp, Artificial Sequence
  Description of Artificial Sequence: Synthetic primer
tccccgttcaaagacagggaatcaattttccatgagttgc

SEQ ID NO: 30209 - DNA, 40 bp, Artificial Sequence
  Description of Artificial Sequence: Synthetic primer
agcagctccaggttctcctccagcagcagcaggccctcat

SEQ ID NO: 30210 - DNA, 40 bp, Artificial Sequence
  Description of Artificial Sequence: Synthetic primer
accctgctcctagcaccctggagagtgcacatgccccttg

SEQ ID NO: 30211 - DNA, 40 bp, Artificial Sequence
  Description of Artificial Sequence: Synthetic primer
attaactcgttaacttatgttgtctaataaaggcaaattc

SEQ ID NO: 30212 - DNA, 40 bp, Artificial Sequence
  Description of Artificial Sequence: Synthetic primer
gagaccccctaatccgcgccaaagagccgccggtcgcgcg

SEQ ID NO: 30213 - DNA, 40 bp, Artificial Sequence
  Description of Artificial Sequence: Synthetic primer
tgaagatgaagatgatgatgttgatggaagagagaaaagc

SEQ ID NO: 30214 - DNA, 40 bp, Artificial Sequence
  Description of Artificial Sequence: Synthetic primer
ttatgttggaacaaattccaacataaaaacagtcggtatc

SEQ ID NO: 30215 - DNA, 40 bp, Artificial Sequence
  Description of Artificial Sequence: Synthetic primer
tggtttgaatactgtatgattctattgtcttaaggatctg

SEQ ID NO: 30216 - DNA, 40 bp, Artificial Sequence
  Description of Artificial Sequence: Synthetic primer
tgtgtacatgattactgcaatatctgagggcaatggtttg

SEQ ID NO: 30217 - DNA, 40 bp, Artificial Sequence
  Description of Artificial Sequence: Synthetic primer
cgttcccgagaatattaactgattcacactggaagaactg

SEQ ID NO: 30218 - DNA, 40 bp, Artificial Sequence
  Description of Artificial Sequence: Synthetic primer
tcgctagaagcaaacttcgctgtatcaaagtagacagacc

SEQ ID NO: 30219 - DNA, 40 bp, Artificial Sequence
  Description of Artificial Sequence: Synthetic primer
atgaagaggctggtagctgactgtgtgaagaaagtaaagg

SEQ ID NO: 30220 - DNA, 40 bp, Artificial Sequence
  Description of Artificial Sequence: Synthetic primer
tggagagattagtctttgcaaatggaaactcaaaatcatc

SEQ ID NO: 30221 - DNA, 40 bp, Artificial Sequence
  Description of Artificial Sequence: Synthetic primer
cacctttacgccattcagatagcatttgacctcgggtatc

SEQ ID NO: 30222 - DNA, 40 bp, Artificial Sequence
  Description of Artificial Sequence: Synthetic primer
ctcttcagcagcacctacaagattcacaacaggaaattag

SEQ ID NO: 30223 - DNA, 40 bp, Artificial Sequence
  Description of Artificial Sequence: Synthetic primer
cgattgatgcactaaattgtttactattgtgatgttaagg

SEQ ID NO: 30224 - DNA, 40 bp, Artificial Sequence
  Description of Artificial Sequence: Synthetic primer
tttccaacagcattgctcatcttgctacaaagcctaagtg

SEQ ID NO: 30225 - DNA, 40 bp, Artificial Sequence
  Description of Artificial Sequence: Synthetic primer
ctgcaggcctgaaccactcccatcaccatcacatactttc

SEQ ID NO: 30226 - DNA, 40 bp, Artificial Sequence
  Description of Artificial Sequence: Synthetic primer
aatttgaattgataaacatggtgggttggctgagggtaag

SEQ ID NO: 30227 - DNA, 40 bp, Artificial Sequence
  Description of Artificial Sequence: Synthetic primer
gacgggcgcctcagggacctggaagcaaccgcaccgaacg

SEQ ID NO: 30228 - DNA, 40 bp, Artificial Sequence
  Description of Artificial Sequence: Synthetic primer
gggactctgcaggtggattacccaggctcagggttaacag

SEQ ID NO: 30229 - DNA, 40 bp, Artificial Sequence
  Description of Artificial Sequence: Synthetic primer
cctgaaggctcaggccgagcacgctgagaaggagaaggag

SEQ ID NO: 30230 - DNA, 40 bp, Artificial Sequence
  Description of Artificial Sequence: Synthetic primer
ggcccagtcgcccttcacccacattaccaccagtgacagc

SEQ ID NO: 30231 - DNA, 40 bp, Artificial Sequence
  Description of Artificial Sequence: Synthetic primer
aatgaaatgtgcaaaaagttctgtctgctttaataaatac

SEQ ID NO: 30232 - DNA, 40 bp, Artificial Sequence
  Description of Artificial Sequence: Synthetic primer
ggacccggcggggcgcaccacagagaccggcttcaatatc

SEQ ID NO: 30233 - DNA, 40 bp, Artificial Sequence
  Description of Artificial Sequence: Synthetic primer
gtagcccctgtggcaaaggccagccctgcaggctccaagc

SEQ ID NO: 30234 - DNA, 40 bp, Artificial Sequence
  Description of Artificial Sequence: Synthetic primer
gcagttcagtctacactccaaccaatacagccttgaaaag

SEQ ID NO: 30235 - DNA, 40 bp, Artificial Sequence
  Description of Artificial Sequence: Synthetic primer
ccgctcctcccactggtccttgttgagtttgtgctgttcc

SEQ ID NO: 30236 - DNA, 40 bp, Artificial Sequence
  Description of Artificial Sequence: Synthetic primer
cttttgaaagcaaagctctggctcacaggccccaaactac

SEQ ID NO: 30237 - DNA, 40 bp, Artificial Sequence
  Description of Artificial Sequence: Synthetic primer
tgacgttcatgctaagtgtttttccagaaatattggtttc

SEQ ID NO: 30238 - DNA, 40 bp, Artificial Sequence
  Description of Artificial Sequence: Synthetic primer
atatgtacacatataaataaagtgcgtccgtgctgcgtga

SEQ ID NO: 30239 - DNA, 40 bp, Artificial Sequence
  Description of Artificial Sequence: Synthetic primer
tatcagctggggcaactcactaggcacgccgctgccagac

SEQ ID NO: 30240 - DNA, 40 bp, Artificial Sequence
  Description of Artificial Sequence: Synthetic primer
ctgtacaaactgttgagtctactccaccactgagtaaaac

SEQ ID NO: 30241 - DNA, 40 bp, Artificial Sequence
  Description of Artificial Sequence: Synthetic primer
aagaactgtacgtgatactggcgtgcactctttttctgac

SEQ ID NO: 30242 - DNA, 40 bp, Artificial Sequence
  Description of Artificial Sequence: Synthetic primer
ttttcttggcaagatgaacaggtttgcacatttatctgtc

SEQ ID NO: 30243 - DNA, 40 bp, Artificial Sequence
  Description of Artificial Sequence: Synthetic primer
tgaagggctgcttgcatgttgtgcaaatgtagctggaagg

SEQ ID NO: 30244 - DNA, 40 bp, Artificial Sequence
  Description of Artificial Sequence: Synthetic primer
acagcacctcagtaatatggaagtccaagttgcttctcag

SEQ ID NO: 30245 - DNA, 40 bp, Artificial Sequence
  Description of Artificial Sequence: Synthetic primer
tcttcgacggctttgactgccagcgtgcggaaggccagtg

SEQ ID NO: 30246 - DNA, 40 bp, Artificial Sequence
  Description of Artificial Sequence: Synthetic primer
actaaatcaccatagcatttagccatatgccccttcatac

SEQ ID NO: 30247 - DNA, 40 bp, Artificial Sequence
  Description of Artificial Sequence: Synthetic primer
tgctccagacaaagcatcaaacagcagggagctagtggag

SEQ ID NO: 30248 - DNA, 40 bp, Artificial Sequence
  Description of Artificial Sequence: Synthetic primer
ggaggcccgtctctgagttgaacagggttgagtccaccag

SEQ ID NO: 30249 - DNA, 40 bp, Artificial Sequence
  Description of Artificial Sequence: Synthetic primer
atgcttcacgagttatcatcaggtcaactctggaacatgc

SEQ ID NO: 30250 - DNA, 40 bp, Artificial Sequence
  Description of Artificial Sequence: Synthetic primer
tacacaagtcaaatgttgaaaaagtgccattctattcttc

SEQ ID NO: 30251 - DNA, 40 bp, Artificial Sequence
  Description of Artificial Sequence: Synthetic primer
ggggcagggagggagctcttgtgcttcttcttctcactgg

SEQ ID NO: 30252 - DNA, 40 bp, Artificial Sequence
  Description of Artificial Sequence: Synthetic primer
gtgggggtgcgtcctcccagggccagccagctcctgcaac

SEQ ID NO: 30253 - DNA, 40 bp, Artificial Sequence
  Description of Artificial Sequence: Synthetic primer
ttcctcctcgcgctgggtgaatctcgtttgaattctatgc

SEQ ID NO: 30254 - DNA, 40 bp, Artificial Sequence
  Description of Artificial Sequence: Synthetic primer
acctctccgcgcgaagacggcttcagccctgcagggaaag

SEQ ID NO: 30255 - DNA, 40 bp, Artificial Sequence
  Description of Artificial Sequence: Synthetic primer
tggtcatctctgttcttttcccgcctccctagttagcatc

SEQ ID NO: 30256 - DNA, 40 bp, Artificial Sequence
  Description of Artificial Sequence: Synthetic primer
gtgaagaggagaccttccccctatgagatggagattactg

SEQ ID NO: 30257 - DNA, 40 bp, Artificial Sequence
  Description of Artificial Sequence: Synthetic primer
atgacgatgggaagacagtggatggcccccatcagcttgg

SEQ ID NO: 30258 - DNA, 40 bp, Artificial Sequence
  Description of Artificial Sequence: Synthetic primer
ttcagttgtacaactagaggtttctcatctatatccaatc

SEQ ID NO: 30259 - DNA, 40 bp, Artificial Sequence
  Description of Artificial Sequence: Synthetic primer
aagggggcccctctcgatacatggtaggctcctgtttgac

SEQ ID NO: 30260 - DNA, 40 bp, Artificial Sequence
  Description of Artificial Sequence: Synthetic primer
ctattctacataatgggagaatgtgccagtaggagactgc

SEQ ID NO: 30261 - DNA, 40 bp, Artificial Sequence
  Description of Artificial Sequence: Synthetic primer
aaaagcatacttctaggatagctaactgtaaatcatgttg

SEQ ID NO: 30262 - DNA, 40 bp, Artificial Sequence
  Description of Artificial Sequence: Synthetic primer
aggctggaaaggcaactgatgcagcttttcctgtgaggag

SEQ ID NO: 30263 - DNA, 40 bp, Artificial Sequence
  Description of Artificial Sequence: Synthetic primer
gaggatagttttgtaaaatctggagtcttcaatgtatcag

SEQ ID NO: 30264 - DNA, 40 bp, Artificial Sequence
  Description of Artificial Sequence: Synthetic primer
aagtgcttggcgtcccggcgctccggctcccatggacttt

SEQ ID NO: 30265 - DNA, 40 bp, Artificial Sequence
  Description of Artificial Sequence: Synthetic primer
atgtggtaataaactttgatttcccaaagctggcagagac

SEQ ID NO: 30266 - DNA, 40 bp, Artificial Sequence
  Description of Artificial Sequence: Synthetic primer
cgtgcaggggaggcccgccctggccccacggcagaatcag

SEQ ID NO: 30267 - DNA, 40 bp, Artificial Sequence
  Description of Artificial Sequence: Synthetic primer
tctgcctttccagcaagatcaacaaaccaagacatgatgg

SEQ ID NO: 30268 - DNA, 40 bp, Artificial Sequence
  Description of Artificial Sequence: Synthetic primer
gcgccgcaggtccagcttggactggaagagttcgtcacac

SEQ ID NO: 30269 - DNA, 40 bp, Artificial Sequence
  Description of Artificial Sequence: Synthetic primer
cgatctctccggccgggaacgaatcttccgtttgagatag

SEQ ID NO: 30270 - DNA, 40 bp, Artificial Sequence
  Description of Artificial Sequence: Synthetic primer
gaaaagaacagataaataccgaacatacagcaagaaacac

SEQ ID NO: 30271 - DNA, 40 bp, Artificial Sequence
  Description of Artificial Sequence: Synthetic primer
aggagtgctaagcaatttgagagcaagatcataaagtgag

SEQ ID NO: 30272 - DNA, 40 bp, Artificial Sequence
  Description of Artificial Sequence: Synthetic primer
atacatatatgttaatagatatatgtgcaactagatatgg

SEQ ID NO: 30273 - DNA, 40 bp, Artificial Sequence
  Description of Artificial Sequence: Synthetic primer
gcacagcagcatctgtgatgattttggcctccctcagatg

SEQ ID NO: 30274 - DNA, 40 bp, Artificial Sequence
  Description of Artificial Sequence: Synthetic primer
gagtgcccctgtggccgatttcacattttcccacttctcc

SEQ ID NO: 30275 - DNA, 40 bp, Artificial Sequence
  Description of Artificial Sequence: Synthetic primer
ggagggcaatggtctctggaaccccttgctgaagtttgtc

SEQ ID NO: 30276 - DNA, 40 bp, Artificial Sequence
  Description of Artificial Sequence: Synthetic primer
taggcctgtcaggtctccttgggaaaggcttcatatttgc

SEQ ID NO: 30277 - DNA, 40 bp, Artificial Sequence
  Description of Artificial Sequence: Synthetic primer
cccctgttgttgtcgttgacatgaatccgacatgacactg

SEQ ID NO: 30278 - DNA, 40 bp, Artificial Sequence
  Description of Artificial Sequence: Synthetic primer
ttatattcaactaatcttaaaaacacatatttttgattgc

SEQ ID NO: 30279 - DNA, 40 bp, Artificial Sequence
  Description of Artificial Sequence: Synthetic primer
agagaccacatctgtgtgcaaaccagaacaggtggccaaa

SEQ ID NO: 30280 - DNA, 40 bp, Artificial Sequence
  Description of Artificial Sequence: Synthetic primer
gggacgagcagaatgaggagaagaggaggcaactgcagag

SEQ ID NO: 30281 - DNA, 40 bp, Artificial Sequence
  Description of Artificial Sequence: Synthetic primer
tcaaagaagaataagcatcaagaaagcacttgacacaaag

SEQ ID NO: 30282 - DNA, 40 bp, Artificial Sequence
  Description of Artificial Sequence: Synthetic primer
ctgcttcttccagacacataacaaactactcatttaacag

SEQ ID NO: 30283 - DNA, 40 bp, Artificial Sequence
  Description of Artificial Sequence: Synthetic primer
cattggttcagttcttggctgcgccatctttggattgtgg

SEQ ID NO: 30284 - DNA, 40 bp, Artificial Sequence
  Description of Artificial Sequence: Synthetic primer
cggcgagtttgtaggcacccaggtcagtgatgttgttctg

SEQ ID NO: 30285 - DNA, 40 bp, Artificial Sequence
  Description of Artificial Sequence: Synthetic primer
acccactgataacaccttctaaatccttcttcagggcttc

SEQ ID NO: 30286 - DNA, 40 bp, Artificial Sequence
  Description of Artificial Sequence: Synthetic primer
caccttgcaagtctcataaaggttcagggccgactcattc

SEQ ID NO: 30287 - DNA, 40 bp, Artificial Sequence
  Description of Artificial Sequence: Synthetic primer
cacccagtcagagaaacagtttgtggtgtttgaggggaac

SEQ ID NO: 30288 - DNA, 40 bp, Artificial Sequence
  Description of Artificial Sequence: Synthetic primer
actgagccgaccccgctccccgccccgcgcggcagccaat

SEQ ID NO: 30289 - DNA, 40 bp, Artificial Sequence
  Description of Artificial Sequence: Synthetic primer
aaagaagaaagccacagtcaagtatctgtctgagaaatgg

SEQ ID NO: 30290 - DNA, 40 bp, Artificial Sequence
  Description of Artificial Sequence: Synthetic primer
agccttgtattcatcgccgtacaccaggtacctatccatc

SEQ ID NO: 30291 - DNA, 40 bp, Artificial Sequence
  Description of Artificial Sequence: Synthetic primer
gctgctgcccccttctgctcctcttcctctctccttcctg

SEQ ID NO: 30292 - DNA, 40 bp, Artificial Sequence
  Description of Artificial Sequence: Synthetic primer
ttcattgcacaagagaaaatatgctgttaagattgatacc

SEQ ID NO: 30293 - DNA, 40 bp, Artificial Sequence
  Description of Artificial Sequence: Synthetic primer
gatggggagagcagtaactacatcaatgctgctcttatgg

SEQ ID NO: 30294 - DNA, 40 bp, Artificial Sequence
  Description of Artificial Sequence: Synthetic primer
ttgctaaaattgttgtctacttcagtagcagatctttcag

SEQ ID NO: 30295 - DNA, 40 bp, Artificial Sequence
  Description of Artificial Sequence: Synthetic primer
agggacccagggtgaatggagccacccggtcaccaagctg

SEQ ID NO: 30296 - DNA, 40 bp, Artificial Sequence
  Description of Artificial Sequence: Synthetic primer
ggagcccgggctgtacaggctgctggagctgatggcgttc

SEQ ID NO: 30297 - DNA, 40 bp, Artificial Sequence
  Description of Artificial Sequence: Synthetic primer
tcgaagtacatacagtccagtctgattacctgctttcttc

SEQ ID NO: 30298 - DNA, 40 bp, Artificial Sequence
  Description of Artificial Sequence: Synthetic primer
atgatcactcaaacttctattacaccctatattgcatctc

SEQ ID NO: 30299 - DNA, 40 bp, Artificial Sequence
  Description of Artificial Sequence: Synthetic primer
ggagatggttgaggaggtgttgacttcattcagggtggag

SEQ ID NO: 30300 - DNA, 40 bp, Artificial Sequence
  Description of Artificial Sequence: Synthetic primer
cctgactgagctgctggctaagatcaccaacacagacgtg

SEQ ID NO: 30301 - DNA, 40 bp, Artificial Sequence
  Description of Artificial Sequence: Synthetic primer
gactgtcagcatcaataaggccattaatacgcaggaagtg

SEQ ID NO: 30302 - DNA, 40 bp, Artificial Sequence
  Description of Artificial Sequence: Synthetic primer
acatggcggcccagagggaatggaccccgatggtgtcatc

SEQ ID NO: 30303 - DNA, 40 bp, Artificial Sequence
  Description of Artificial Sequence: Synthetic primer
ctggttccgacagtcttcaaagacaatggtgttcatgagg

SEQ ID NO: 30304 - DNA, 40 bp, Artificial Sequence
  Description of Artificial Sequence: Synthetic primer
tatggggggactctcaacagtaggtgcctgccctggaatc

SEQ ID NO: 30305 - DNA, 40 bp, Artificial Sequence
  Description of Artificial Sequence: Synthetic primer
ctcaaataaataatatttatacttttgttccaatcttaaa

SEQ ID NO: 30306 - DNA, 40 bp, Artificial Sequence
  Description of Artificial Sequence: Synthetic primer
ggccgagcttgcaccagaattcgcacttcaagttcttcag

SEQ ID NO: 30307 - DNA, 40 bp, Artificial Sequence
  Description of Artificial Sequence: Synthetic primer
tctgtgcagaaatctggggctctaaatgaattaccaaacc

SEQ ID NO: 30308 - DNA, 40 bp, Artificial Sequence
  Description of Artificial Sequence: Synthetic primer
cttctcaaagcccagatctccgtcgtgagagggctcatag

SEQ ID NO: 30309 - DNA, 40 bp, Artificial Sequence
  Description of Artificial Sequence: Synthetic primer
gggggtgcgctctgggagctactaacaggagtagaggtag

SEQ ID NO: 30310 - DNA, 40 bp, Artificial Sequence
  Description of Artificial Sequence: Synthetic primer
agccccgggccgagctgggcgacgtgagcagttggttgag

SEQ ID NO: 30311 - DNA, 40 bp, Artificial Sequence
  Description of Artificial Sequence: Synthetic primer
ctggctgtttaaaagctggagaggaagtgaaagcgtcaag

SEQ ID NO: 30312 - DNA, 40 bp, Artificial Sequence
  Description of Artificial Sequence: Synthetic primer
cagatgcgttaatatacgggttttagagagaacctatcag

SEQ ID NO: 30313 - DNA, 40 bp, Artificial Sequence
  Description of Artificial Sequence: Synthetic primer
aaaaaagagctggaggattcgttggagcgcatcagtgacc

SEQ ID NO: 30314 - DNA, 40 bp, Artificial Sequence
  Description of Artificial Sequence: Synthetic primer
cattgcgttctgccatctctatgtctttctgtagtttctg

SEQ ID NO: 30315 - DNA, 40 bp, Artificial Sequence
  Description of Artificial Sequence: Synthetic primer
atgccttcccccagtatgtccttttctggattaaaatgag

SEQ ID NO: 30316 - DNA, 40 bp, Artificial Sequence
  Description of Artificial Sequence: Synthetic primer
gaactcttaacaaaccatctgctttataagaataatgctc

SEQ ID NO: 30317 - DNA, 40 bp, Artificial Sequence
  Description of Artificial Sequence: Synthetic primer
cctgcccttgagagtggctacacccagatcagcccagaac

SEQ ID NO: 30318 - DNA, 40 bp, Artificial Sequence
  Description of Artificial Sequence: Synthetic primer
catggaggaccagcgtgctcctcgtcacacggtccacagg

SEQ ID NO: 30319 - DNA, 40 bp, Artificial Sequence
  Description of Artificial Sequence: Synthetic primer
gtgagaaagatcaagctggacttgagccactggccctcag

SEQ ID NO: 30320 - DNA, 40 bp, Artificial Sequence
  Description of Artificial Sequence: Synthetic primer
gattttattactggcgtggattaaacttatgaatgtttcc

SEQ ID NO: 30321 - DNA, 40 bp, Artificial Sequence
  Description of Artificial Sequence: Synthetic primer
tgtaaattgctggcagatgctttacagtcaatagtgttgc

SEQ ID NO: 30322 - DNA, 40 bp, Artificial Sequence
  Description of Artificial Sequence: Synthetic primer
agctgcatcgagcaactggagaaaagctggagccagtatc

SEQ ID NO: 30323 - DNA, 40 bp, Artificial Sequence
  Description of Artificial Sequence: Synthetic primer
ggagcagctgctcaagtactcgccggacccggtggtcgtc

SEQ ID NO: 30324 - DNA, 40 bp, Artificial Sequence
  Description of Artificial Sequence: Synthetic primer
agacaggtaacaggaagcaggaagggactttggtcatctg

SEQ ID NO: 30325 - DNA, 40 bp, Artificial Sequence
  Description of Artificial Sequence: Synthetic primer
ggaatattgcctgagtcccaggaaccagcctcgccggatg

SEQ ID NO: 30326 - DNA, 40 bp, Artificial Sequence
  Description of Artificial Sequence: Synthetic primer
atgcccccaaagctctccagccagactgaggtcacagatg

SEQ ID NO: 30327 - DNA, 40 bp, Artificial Sequence
  Description of Artificial Sequence: Synthetic primer
aaaaaggtccattagagctttgaattccatatcttcatcc

SEQ ID NO: 30328 - DNA, 40 bp, Artificial Sequence
  Description of Artificial Sequence: Synthetic primer
cagacaccacttcgagatgtctgctttcaccttctaaaac

SEQ ID NO: 30329 - DNA, 40 bp, Artificial Sequence
  Description of Artificial Sequence: Synthetic primer
gggctccccttgtgccagagaaggaggaagctatcagtgg

SEQ ID NO: 30330 - DNA, 40 bp, Artificial Sequence
  Description of Artificial Sequence: Synthetic primer
gtgctggctgccgccctgcgccgagctgtagtgcgacgtg

SEQ ID NO: 30331 - DNA, 40 bp, Artificial Sequence
  Description of Artificial Sequence: Synthetic primer
acaacctcggggaggccgcggcctcatcactgactcactc

SEQ ID NO: 30332 - DNA, 40 bp, Artificial Sequence
  Description of Artificial Sequence: Synthetic primer
ggcgtcagtccttcctcttctccacgcaggcttcaacagg

SEQ ID NO: 30333 - DNA, 40 bp, Artificial Sequence
  Description of Artificial Sequence: Synthetic primer
ctgaagacgtctcttccaagagcagtttagaatctttatc

SEQ ID NO: 30334 - DNA, 40 bp, Artificial Sequence
  Description of Artificial Sequence: Synthetic primer
cagagaagggacgaccttccttgctgccaagccgacattc

SEQ ID NO: 30335 - DNA, 40 bp, Artificial Sequence
  Description of Artificial Sequence: Synthetic primer
ccgaggggccaacggtgctcccggcaacgatggtgctaag

SEQ ID NO: 30336 - DNA, 40 bp, Artificial Sequence
  Description of Artificial Sequence: Synthetic primer
ggccctcatgattaagcagatggcgtcgcggaatcagcag

SEQ ID NO: 30337 - DNA, 40 bp, Artificial Sequence
  Description of Artificial Sequence: Synthetic primer
acatgaagaaggaattacagtcatctcagatttattgttg

SEQ ID NO: 30338 - DNA, 40 bp, Artificial Sequence
  Description of Artificial Sequence: Synthetic primer
ctgttctcctcctccagctcatccttcctgttcatcatgg

SEQ ID NO: 30339 - DNA, 40 bp, Artificial Sequence
  Description of Artificial Sequence: Synthetic primer
tccagcctgtggtcgtcttaactaataaatgtgatttttc

SEQ ID NO: 30340 - DNA, 40 bp, Artificial Sequence
  Description of Artificial Sequence: Synthetic primer
ggcccagatcggagagaggcttttcaggagaccctgcttg

SEQ ID NO: 30341 - DNA, 40 bp, Artificial Sequence
  Description of Artificial Sequence: Synthetic primer
tctgcccgagtggagccacacagcccacttagaggaggag

SEQ ID NO: 30342 - DNA, 40 bp, Artificial Sequence
  Description of Artificial Sequence: Synthetic primer
accgtcctgccttccgagatcgatgtgcgccaggagtacc

SEQ ID NO: 30343 - DNA, 40 bp, Artificial Sequence
  Description of Artificial Sequence: Synthetic primer
ttacaaatataaggttcttcagcacatattactctgattg

SEQ ID NO: 30344 - DNA, 40 bp, Artificial Sequence
  Description of Artificial Sequence: Synthetic primer
gaacctggaagttgtggacggcctccaaaattaacatttc

SEQ ID NO: 30345 - DNA, 40 bp, Artificial Sequence
  Description of Artificial Sequence: Synthetic primer
agtattaataacataatctttaaatttgtgagggaaaacc

SEQ ID NO: 30346 - DNA, 40 bp, Artificial Sequence
  Description of Artificial Sequence: Synthetic primer
gcctctttttcccaggaaggagggaaagagaatgatacag

SEQ ID NO: 30347 - DNA, 40 bp, Artificial Sequence
  Description of Artificial Sequence: Synthetic primer
tgacctagtggacaagctgaatttgaaatagactgtgaag

SEQ ID NO: 30348 - DNA, 40 bp, Artificial Sequence
  Description of Artificial Sequence: Synthetic primer
ggcatggaattgaatttcatctgtctgtgggaattgtaag

SEQ ID NO: 30349 - DNA, 40 bp, Artificial Sequence
  Description of Artificial Sequence: Synthetic primer
tcctggagctttttcccaaattagcatctgtttcccgaag

SEQ ID NO: 30350 - DNA, 40 bp, Artificial Sequence
  Description of Artificial Sequence: Synthetic primer
gaaggagatgaagccttaaagtattatgccaaccacactg

SEQ ID NO: 30351 - DNA, 40 bp, Artificial Sequence
  Description of Artificial Sequence: Synthetic primer
ggcccctgagatctctgcaggaaatggctgtggagtgtgg

SEQ ID NO: 30352 - DNA, 40 bp, Artificial Sequence
  Description of Artificial Sequence: Synthetic primer
ttgatgatttcccgattgttggctagggtgttaaacagtg

SEQ ID NO: 30353 - DNA, 40 bp, Artificial Sequence
  Description of Artificial Sequence: Synthetic primer
aacattctgtactttaagcatgaaaagcaatatttcaaag

SEQ ID NO: 30354 - DNA, 40 bp, Artificial Sequence
  Description of Artificial Sequence: Synthetic primer
cattttgagaagttgagtataaaaacagcaggaaaaatgg

SEQ ID NO: 30355 - DNA, 40 bp, Artificial Sequence
  Description of Artificial Sequence: Synthetic primer
ctccgggggacctcgctcttttcgagggagcaatggagac

SEQ ID NO: 30356 - DNA, 40 bp, Artificial Sequence
  Description of Artificial Sequence: Synthetic primer
ctctcctcggcactcaagctaggtcctgatcctggaaagc

SEQ ID NO: 30357 - DNA, 40 bp, Artificial Sequence
  Description of Artificial Sequence: Synthetic primer
aatttataaagtatccaattttaagtttcttttctgtttg

SEQ ID NO: 30358 - DNA, 40 bp, Artificial Sequence
  Description of Artificial Sequence: Synthetic primer
catttaatcttttactgctgaggtcttgtgagtgtcttac

SEQ ID NO: 30359 - DNA, 40 bp, Artificial Sequence
  Description of Artificial Sequence: Synthetic primer
gggcatcacctcttagcacaaccaaaggaaagagttttgg

SEQ ID NO: 30360 - DNA, 40 bp, Artificial Sequence
  Description of Artificial Sequence: Synthetic primer
ccgcccatcatttgtggtggcatgttttgctgggcattgg

SEQ ID NO: 30361 - DNA, 40 bp, Artificial Sequence
  Description of Artificial Sequence: Synthetic primer
agattgtcccactgctgagacctgtagggcagcttctaac

SEQ ID NO: 30362 - DNA, 40 bp, Artificial Sequence
  Description of Artificial Sequence: Synthetic primer
agctggaggagcaactcaaggaagtcagaaagaaatgtgc

SEQ ID NO: 30363 - DNA, 40 bp, Artificial Sequence
  Description of Artificial Sequence: Synthetic primer
atagtatatgctttccaggtgtgggggtggtaaagtaatg

SEQ ID NO: 30364 - DNA, 40 bp, Artificial Sequence
  Description of Artificial Sequence: Synthetic primer
ctgtgtaagcttctccaacttgtcttcctttatgtacacc

SEQ ID NO: 30365 - DNA, 40 bp, Artificial Sequence
  Description of Artificial Sequence: Synthetic primer
tgcaagattaaattagtgttggcaaaataaagttctaaag

SEQ ID NO: 30366 - DNA, 40 bp, Artificial Sequence
  Description of Artificial Sequence: Synthetic primer
caatgcctttccccatgctgcctccgtgtacgggcagttc

SEQ ID NO: 30367 - DNA, 40 bp, Artificial Sequence
  Description of Artificial Sequence: Synthetic primer
gagcagaactttgtgatgcttcattctgtggaattttgtg

SEQ ID NO: 30368 - DNA, 40 bp, Artificial Sequence
  Description of Artificial Sequence: Synthetic primer
gtcatgactggccaatcaaaaacagtacatcacaaatgac

SEQ ID NO: 30369 - DNA, 40 bp, Artificial Sequence
  Description of Artificial Sequence: Synthetic primer
ggctccccaacaggcaggtgtgagtggaggcaaggagatg

SEQ ID NO: 30370 - DNA, 40 bp, Artificial Sequence
  Description of Artificial Sequence: Synthetic primer
gatcgagagttaccagaacctgactcgggtggcagactac

SEQ ID NO: 30371 - DNA, 40 bp, Artificial Sequence
  Description of Artificial Sequence: Synthetic primer
gatttgggatttagccgacacagatggcaaaggtatcctg

SEQ ID NO: 30372 - DNA, 40 bp, Artificial Sequence
  Description of Artificial Sequence: Synthetic primer
ccagtactgacctaatttggatctgctgagtatttagagg

SEQ ID NO: 30373 - DNA, 40 bp, Artificial Sequence
  Description of Artificial Sequence: Synthetic primer
gtgactggccagccctgggtgctctggtcactggcacagg

SEQ ID NO: 30374 - DNA, 40 bp, Artificial Sequence
  Description of Artificial Sequence: Synthetic primer
aagaaacctcagattgacagcaacaagagcaataactacc

SEQ ID NO: 30375 - DNA, 40 bp, Artificial Sequence
  Description of Artificial Sequence: Synthetic primer
gttgttattcctcctgctggaatgttcattggattatttc

SEQ ID NO: 30376 - DNA, 40 bp, Artificial Sequence
  Description of Artificial Sequence: Synthetic primer
gtggcctccttctactgcgagtgtccccatggccgcacag

SEQ ID NO: 30377 - DNA, 40 bp, Artificial Sequence
  Description of Artificial Sequence: Synthetic primer
agactgtctgaagactcctgacttccaagaggcattaacc

SEQ ID NO: 30378 - DNA, 40 bp, Artificial Sequence
  Description of Artificial Sequence: Synthetic primer
caggtacgacaagcaatctctaaagcaataaatactactg

SEQ ID NO: 30379 - DNA, 40 bp, Artificial Sequence
  Description of Artificial Sequence: Synthetic primer
gtcctagggcccctgtaggctccatcaacgccaggaccac

SEQ ID NO: 30380 - DNA, 40 bp, Artificial Sequence
  Description of Artificial Sequence: Synthetic primer
tgtggcggcggcggcggctgatgggagcgaggcatcatgg

SEQ ID NO: 30381 - DNA, 40 bp, Artificial Sequence
  Description of Artificial Sequence: Synthetic primer
gattgacatttcaccatctttttgtaaaatcaggttcagc

SEQ ID NO: 30382 - DNA, 40 bp, Artificial Sequence
  Description of Artificial Sequence: Synthetic primer
cgccaaccccatcagcccagcccgttaaatgtcaaacgtc

SEQ ID NO: 30383 - DNA, 40 bp, Artificial Sequence
  Description of Artificial Sequence: Synthetic primer
gctgctggaaagcaatccttacaggagacccctaattgac

SEQ ID NO: 30384 - DNA, 40 bp, Artificial Sequence
  Description of Artificial Sequence: Synthetic primer
ctgacaggcgatcttgaacatcagaagtacttgcagcaga

SEQ ID NO: 30385 - DNA, 40 bp, Artificial Sequence
  Description of Artificial Sequence: Synthetic primer
tgtgaacagcttttaattcaataacattagagaagcagag

SEQ ID NO: 30386 - DNA, 40 bp, Artificial Sequence
  Description of Artificial Sequence: Synthetic primer
ctcgaagccccgtttccgcactcgctccacaaaagctgag

SEQ ID NO: 30387 - DNA, 40 bp, Artificial Sequence
  Description of Artificial Sequence: Synthetic primer
accctgagtatgtctgggttcatgaaaaagcaaaatatag

SEQ ID NO: 30388 - DNA, 40 bp, Artificial Sequence
  Description of Artificial Sequence: Synthetic primer
gccgacacactggagatcatcaatgacaccatcaggttcc

SEQ ID NO: 30389 - DNA, 40 bp, Artificial Sequence
  Description of Artificial Sequence: Synthetic primer
aaaagacagaagcttatttgccagatgacaagaacaaatc

SEQ ID NO: 30390 - DNA, 40 bp, Artificial Sequence
  Description of Artificial Sequence: Synthetic primer
tcaacgaggccgtcctcgcaaatactgccccgatgaaaac

SEQ ID NO: 30391 - DNA, 40 bp, Artificial Sequence
  Description of Artificial Sequence: Synthetic primer
agtgttgttggcgctttcgatccagagtgtgtttttatac

SEQ ID NO: 30392 - DNA, 40 bp, Artificial Sequence
  Description of Artificial Sequence: Synthetic primer
aatctcactgagatcaccactgatgtggaaaagattcagg

SEQ ID NO: 30393 - DNA, 40 bp, Artificial Sequence
  Description of Artificial Sequence: Synthetic primer
ccagggcctcatctgcttcaaagccaaagtcttcctcaac

SEQ ID NO: 30394 - DNA, 40 bp, Artificial Sequence
  Description of Artificial Sequence: Synthetic primer
gatccacctaaaaacacagatcaatttaggacagaaacag

SEQ ID NO: 30395 - DNA, 40 bp, Artificial Sequence
  Description of Artificial Sequence: Synthetic primer
ggggcagcgcgtgcccgcccgctgactgcacataggtgat

SEQ ID NO: 30396 - DNA, 40 bp, Artificial Sequence
  Description of Artificial Sequence: Synthetic primer
attagaatgttgattaaaataagaaaatggaataaatatc

SEQ ID NO: 30397 - DNA, 40 bp, Artificial Sequence
  Description of Artificial Sequence: Synthetic primer
aaagctgaacttttgtctgttaagaagcaacttgaaatag

SEQ ID NO: 30398 - DNA, 40 bp, Artificial Sequence
  Description of Artificial Sequence: Synthetic primer
caatcgttttgtacgcagagtaatgtgtgctgccggactg

SEQ ID NO: 30399 - DNA, 40 bp, Artificial Sequence
  Description of Artificial Sequence: Synthetic primer
gatgggttctctttcactcctgcccagcaagaggcgaatc

SEQ ID NO: 30400 - DNA, 40 bp, Artificial Sequence
  Description of Artificial Sequence: Synthetic primer
aaaaccttctaaagactccagagaacataaaagtgccttc

SEQ ID NO: 30401 - DNA, 40 bp, Artificial Sequence
  Description of Artificial Sequence: Synthetic primer
tcgatttttaataaattgttgcaaatttgtttttatgaat

SEQ ID NO: 30402 - DNA, 40 bp, Artificial Sequence
  Description of Artificial Sequence: Synthetic primer
tggcaatgcagaatattttgttattggccttttctattcc

SEQ ID NO: 30403 - DNA, 40 bp, Artificial Sequence
  Description of Artificial Sequence: Synthetic primer
gccgaggaggaagaagcagctgcggcggccacaccctgga

SEQ ID NO: 30404 - DNA, 40 bp, Artificial Sequence
  Description of Artificial Sequence: Synthetic primer
ggctcgccggtcagcggctcgtcgccgttcgccacccaag

SEQ ID NO: 30405 - DNA, 40 bp, Artificial Sequence
  Description of Artificial Sequence: Synthetic primer
ccagggaagcgcgtctctgctctggaaggagccccgtgag

SEQ ID NO: 30406 - DNA, 40 bp, Artificial Sequence
  Description of Artificial Sequence: Synthetic primer
gggggctagggaggctttagaagggggaacaaaagagaag

SEQ ID NO: 30407 - DNA, 40 bp, Artificial Sequence
  Description of Artificial Sequence: Synthetic primer
cgatgtgggccgggcagaggtctctgttcaggtcaacgtc

SEQ ID NO: 30408 - DNA, 40 bp, Artificial Sequence
  Description of Artificial Sequence: Synthetic primer
cattccaggaactcagaatttcgaagtgaacatttttgtg

SEQ ID NO: 30409 - DNA, 40 bp, Artificial Sequence
  Description of Artificial Sequence: Synthetic primer
ctgcagcccatggctggcacctgccccgcccccgagatcc

SEQ ID NO: 30410 - DNA, 40 bp, Artificial Sequence
  Description of Artificial Sequence: Synthetic primer
gcgcggactggcggagacacagcggttgcgtcaccggtgc

SEQ ID NO: 30411 - DNA, 40 bp, Artificial Sequence
  Description of Artificial Sequence: Synthetic primer
cccgagtcctgcagcaagcctgagaagatcctcaagaagg

SEQ ID NO: 30412 - DNA, 40 bp, Artificial Sequence
  Description of Artificial Sequence: Synthetic primer
gccggctggggaactgggcacgctggagctgggggagctg

SEQ ID NO: 30413 - DNA, 40 bp, Artificial Sequence
  Description of Artificial Sequence: Synthetic primer
tgtaaaaaatatctaaaccacattgatcatgaaatagttg

SEQ ID NO: 30414 - DNA, 40 bp, Artificial Sequence
  Description of Artificial Sequence: Synthetic primer
ttcagctcttatggtctgttgtataaatgtgtatctaggc

SEQ ID NO: 30415 - DNA, 40 bp, Artificial Sequence
  Description of Artificial Sequence: Synthetic primer
ttcaacaccaatgtggccatggcagagatttataagtacg

SEQ ID NO: 30416 - DNA, 40 bp, Artificial Sequence
  Description of Artificial Sequence: Synthetic primer
aagggagaagatgaggaagagaacaatttggaagtacgtg

SEQ ID NO: 30417 - DNA, 40 bp, Artificial Sequence
  Description of Artificial Sequence: Synthetic primer
cagactggacctggtatctgcatgaatgctaactttaacc

SEQ ID NO: 30418 - DNA, 40 bp, Artificial Sequence
  Description of Artificial Sequence: Synthetic primer
atttaggctaaaaatataaagaaacacaaatcattcatgc

SEQ ID NO: 30419 - DNA, 40 bp, Artificial Sequence
  Description of Artificial Sequence: Synthetic primer
tggccggcccccaccagcgccgagggcggctcggacttgc

SEQ ID NO: 30420 - DNA, 40 bp, Artificial Sequence
  Description of Artificial Sequence: Synthetic primer
gcgggttgtgtttgcgcatatgtttcataaggtatgtttc

SEQ ID NO: 30421 - DNA, 40 bp, Artificial Sequence
  Description of Artificial Sequence: Synthetic primer
ctccgtctcttggacctaagatggaatgtgtccccagctc

SEQ ID NO: 30422 - DNA, 40 bp, Artificial Sequence
  Description of Artificial Sequence: Synthetic primer
cctcagtacgccacctactattacccccagtatctgcaag

SEQ ID NO: 30423 - DNA, 40 bp, Artificial Sequence
  Description of Artificial Sequence: Synthetic primer
aggatctgggagaacgtggtcctctggtcctgtcccgttc

SEQ ID NO: 30424 - DNA, 40 bp, Artificial Sequence
  Description of Artificial Sequence: Synthetic primer
tttcgatgtcatctatggaccccaatccattagaagttcc

SEQ ID NO: 30425 - DNA, 40 bp, Artificial Sequence
  Description of Artificial Sequence: Synthetic primer
atgacgcgttatccgtcttagtctctctctctctgagcac

SEQ ID NO: 30426 - DNA, 40 bp, Artificial Sequence
  Description of Artificial Sequence: Synthetic primer
atagtatctctgagaaactgtgattccatttgactactgc

SEQ ID NO: 30427 - DNA, 40 bp, Artificial Sequence
  Description of Artificial Sequence: Synthetic primer
gaaagtgagtttccaacaggcgcctcctgcggcactatcc

SEQ ID NO: 30428 - DNA, 40 bp, Artificial Sequence
  Description of Artificial Sequence: Synthetic primer
agagggttcaaatgaaagccgagttgtaactatccataag

SEQ ID NO: 30429 - DNA, 40 bp, Artificial Sequence
  Description of Artificial Sequence: Synthetic primer
agtggaattgtgctgtgccttgcaggaggtaagaccttgg

SEQ ID NO: 30430 - DNA, 40 bp, Artificial Sequence
  Description of Artificial Sequence: Synthetic primer
accctgtggcctgagccacattgtcttccatttcaacttc

SEQ ID NO: 30431 - DNA, 40 bp, Artificial Sequence
  Description of Artificial Sequence: Synthetic primer
ttgagaggcccatagcaagtgggcaatgggggcagaagtc

SEQ ID NO: 30432 - DNA, 40 bp, Artificial Sequence
  Description of Artificial Sequence: Synthetic primer
tactctcaaaaagaagataaatatgaggaagaaatcaaga

SEQ ID NO: 30433 - DNA, 40 bp, Artificial Sequence
  Description of Artificial Sequence: Synthetic primer
cttcaggcttgccagaagggcagtaagccacttgtttttc

SEQ ID NO: 30434 - DNA, 40 bp, Artificial Sequence
  Description of Artificial Sequence: Synthetic primer
gaccatgtgctgcaccctggcctggggacctacagggtgt

SEQ ID NO: 30435 - DNA, 40 bp, Artificial Sequence
  Description of Artificial Sequence: Synthetic primer
cagccggcactgcatgcaatttcttttccatcttttctgg

SEQ ID NO: 30436 - DNA, 40 bp, Artificial Sequence
  Description of Artificial Sequence: Synthetic primer
gtgttgcctgaggccctagggaatattggggaatagaagg

SEQ ID NO: 30437 - DNA, 40 bp, Artificial Sequence
  Description of Artificial Sequence: Synthetic primer
gggccgcctcctctttcttcttcctcttctcctcttcaac

SEQ ID NO: 30438 - DNA, 40 bp, Artificial Sequence
  Description of Artificial Sequence: Synthetic primer
caggggtgtgtttcccgcaaaggtgcgagcgttcacgttg

SEQ ID NO: 30439 - DNA, 40 bp, Artificial Sequence; identical to SEQ ID NO: 21922
  Description of Artificial Sequence: Synthetic primer

SEQ ID NO: 30440 - DNA, 40 bp, Artificial Sequence
  Description of Artificial Sequence: Synthetic primer
ttgcttttaacaatttatagaatttaacagatgtactgtc

SEQ ID NO: 30441 - DNA, 40 bp, Artificial Sequence
  Description of Artificial Sequence: Synthetic primer
gggcaaaactgagcactagtgtgcgtttggggtaggctat

SEQ ID NO: 30442 - DNA, 40 bp, Artificial Sequence
  Description of Artificial Sequence: Synthetic primer
tatttaatacctgtgtatatatgcatcacgggggcgacat

SEQ ID NO: 30443 - DNA, 40 bp, Artificial Sequence
  Description of Artificial Sequence: Synthetic primer
atctttcctgtatttcactttcttcctgttgtagagtatc

SEQ ID NO: 30444 - DNA, 40 bp, Artificial Sequence
  Description of Artificial Sequence: Synthetic primer
acagtctttggattaaccctctatagacagaatagatagc

SEQ ID NO: 30445 - DNA, 40 bp, Artificial Sequence
  Description of Artificial Sequence: Synthetic primer
cctggtggtccacggtgcacatgatcttaagttctgaatc

SEQ ID NO: 30446 - DNA, 40 bp, Artificial Sequence
  Description of Artificial Sequence: Synthetic primer
gatgtcacttttggaactctgtagatcagaaaaactgtgc

SEQ ID NO: 30447 - DNA, 40 bp, Artificial Sequence
  Description of Artificial Sequence: Synthetic primer
tttccaccgccaccacgtgaatccccaaagccaaagttgc

SEQ ID NO: 30448 - DNA, 40 bp, Artificial Sequence
  Description of Artificial Sequence: Synthetic primer
gatgctgtgaagagctatacttttgaactgttaactcaag

SEQ ID NO: 30449 - DNA, 40 bp, Artificial Sequence
  Description of Artificial Sequence: Synthetic primer
ccacgtctgtccggggcccaggtcccttacctaggctttg

SEQ ID NO: 30450 - DNA, 40 bp, Artificial Sequence
  Description of Artificial Sequence: Synthetic primer
ccgcaccggacaacttgcgagccatggggctggcggatgc

SEQ ID NO: 30451 - DNA, 40 bp, Artificial Sequence
  Description of Artificial Sequence: Synthetic primer
aggagcacgtgctccacgaagagtgcggtggagaaaatcc

SEQ ID NO: 30452 - DNA, 40 bp, Artificial Sequence
  Description of Artificial Sequence: Synthetic primer
cctaggtggagggacctcaccttcaggcagaggtggtttg

SEQ ID NO: 30453 - DNA, 40 bp, Artificial Sequence
  Description of Artificial Sequence: Synthetic primer
ggcggacggagataaaagaacgctgctccagagaacaacc

SEQ ID NO: 30454 - DNA, 40 bp, Artificial Sequence
  Description of Artificial Sequence: Synthetic primer
tcatacccagcatggcccgggcataggggcccttcttcag

SEQ ID NO: 30455 - DNA, 40 bp, Artificial Sequence
  Description of Artificial Sequence: Synthetic primer
gatggtcaacttgatgcctgaaggggtcttgagaaaatcc

SEQ ID NO: 30456 - DNA, 40 bp, Artificial Sequence
  Description of Artificial Sequence: Synthetic primer
gcccgcggtgctggcgcctcagcgctctcaggctgactgc

SEQ ID NO: 30457 - DNA, 40 bp, Artificial Sequence
  Description of Artificial Sequence: Synthetic primer
atctcttgcttcagtttgttgccttgtattgttgttatag

SEQ ID NO: 30458 - DNA, 40 bp, Artificial Sequence
  Description of Artificial Sequence: Synthetic primer
acagaagaataatataattgccttccttcttaactgtttt

SEQ ID NO: 30459 - DNA, 40 bp, Artificial Sequence
  Description of Artificial Sequence: Synthetic primer
gggttaatctgatgcctactcccgcctataatgtcaattc

SEQ ID NO: 30460 - DNA, 40 bp, Artificial Sequence
  Description of Artificial Sequence: Synthetic primer
tcaaaaaaattgttttcagtacaaaaagtcttgttaagag

SEQ ID NO: 30461 - DNA, 40 bp, Artificial Sequence
  Description of Artificial Sequence: Synthetic primer
ttttgcagaatttgccatttatgattacttgaattgatgg

SEQ ID NO: 30462 - DNA, 40 bp, Artificial Sequence
  Description of Artificial Sequence: Synthetic primer
gagagtcccttagtggacatttctagttaccaagctgctg

SEQ ID NO: 30463 - DNA, 40 bp, Artificial Sequence
  Description of Artificial Sequence: Synthetic primer
catcgtggctctgagaactgacgccgtgaatgttgacctg

SEQ ID NO: 30464 - DNA, 40 bp, Artificial Sequence
  Description of Artificial Sequence: Synthetic primer
tcctttgccaaatcactgtgcacatgcacgtcccatgggc

SEQ ID NO: 30465 - DNA, 40 bp, Artificial Sequence
  Description of Artificial Sequence: Synthetic primer
cctcgccgccgcgctccgagtccgggccctgccgactctc

SEQ ID NO: 30466 - DNA, 40 bp, Artificial Sequence
  Description of Artificial Sequence: Synthetic primer
tctgactgacgcatgcccaataaactgaccccacactcac

SEQ ID NO: 30467 - DNA, 40 bp, Artificial Sequence
  Description of Artificial Sequence: Synthetic primer
atggagagtaaccgcagatacacaaaggacaggttcacag

SEQ ID NO: 30468 - DNA, 40 bp, Artificial Sequence
  Description of Artificial Sequence: Synthetic primer
tttttccaccagataactgcttggtacatatccttcatgc

SEQ ID NO: 30469 - DNA, 40 bp, Artificial Sequence
  Description of Artificial Sequence: Synthetic primer
gatccgcaacgagtcactcctgcgcccctacttcctcgac

SEQ ID NO: 30470 - DNA, 40 bp, Artificial Sequence
  Description of Artificial Sequence: Synthetic primer
atgtttttttgtagactagtttcatattgtacttctttgc

SEQ ID NO: 30471 - DNA, 40 bp, Artificial Sequence
  Description of Artificial Sequence: Synthetic primer
tagttgccatggtaactagatgcttgatgccaccactctg

SEQ ID NO: 30472 - DNA, 40 bp, Artificial Sequence
  Description of Artificial Sequence: Synthetic primer
caatggaccagagagctgagtgttctaatatcacaatagg

SEQ ID NO: 30473 - DNA, 40 bp, Artificial Sequence
  Description of Artificial Sequence: Synthetic primer
ccatgttcttcatcagccactcgtcagctttgtaatccac

SEQ ID NO: 30474 - DNA, 40 bp, Artificial Sequence
  Description of Artificial Sequence: Synthetic primer
taagggccggggatggatcttttctaaatgttattacttg

SEQ ID NO: 30475 - DNA, 40 bp, Artificial Sequence
  Description of Artificial Sequence: Synthetic primer
gtgctgactaagcctctcaaaccctgttagaagtggagtg

SEQ ID NO: 30476 - DNA, 40 bp, Artificial Sequence
  Description of Artificial Sequence: Synthetic primer
cggcggtaatcagagagctcggctaaacgccggtcggaac

SEQ ID NO: 30477 - DNA, 40 bp, Artificial Sequence
  Description of Artificial Sequence: Synthetic primer
ttccggctgattttggatttgaagagggtgttgattaagg

SEQ ID NO: 30478 - DNA, 40 bp, Artificial Sequence
  Description of Artificial Sequence: Synthetic primer
atggacaacttcagggccgatcatggagtcttccaagtca

SEQ ID NO: 30479 - DNA, 40 bp, Artificial Sequence
  Description of Artificial Sequence: Synthetic primer
gggcagctgctgctccagagacagggcgtccatggctaca

SEQ ID NO: 30480 - DNA, 40 bp, Artificial Sequence
  Description of Artificial Sequence: Synthetic primer
acctcctcatctgtggaactctcctgcactgggtcatagc

SEQ ID NO: 30481 - DNA, 40 bp, Artificial Sequence
  Description of Artificial Sequence: Synthetic primer
ctgtgtgctactgggaccgcagacagcacattctctgctc

SEQ ID NO: 30482 - DNA, 40 bp, Artificial Sequence
  Description of Artificial Sequence: Synthetic primer
tctgccctacagcacgaaggccacgtttattactgaactc

SEQ ID NO: 30483 - DNA, 40 bp, Artificial Sequence
  Description of Artificial Sequence: Synthetic primer
tttcaaagccttgaattcttctttttcatgtacctgatgc

SEQ ID NO: 30484 - DNA, 40 bp, Artificial Sequence
  Description of Artificial Sequence: Synthetic primer
gcccggagcgcgtgggccccgggcggctggcagttcaacg

SEQ ID NO: 30485 - DNA, 40 bp, Artificial Sequence
  Description of Artificial Sequence: Synthetic primer
gctttctgctcccattcatacccagatgcaacagaaggag

SEQ ID NO: 30486 - DNA, 40 bp, Artificial Sequence
  Description of Artificial Sequence: Synthetic primer
aaaaacctatcgttagagtcttcctgcccaacaaacagag

SEQ ID NO: 30487 - DNA, 40 bp, Artificial Sequence
  Description of Artificial Sequence: Synthetic primer
gctttcaagaggtcctaactgatcctttcttccactttgc

SEQ ID NO: 30488 - DNA, 40 bp, Artificial Sequence
  Description of Artificial Sequence: Synthetic primer
caaaagctttgctgaagggcagactagtattaacaagacc

SEQ ID NO: 30489 - DNA, 40 bp, Artificial Sequence
  Description of Artificial Sequence: Synthetic primer
tgtcacagatccaaacgagccttttgtaatttgtcaaagc

SEQ ID NO: 30490 - DNA, 40 bp, Artificial Sequence
  Description of Artificial Sequence: Synthetic primer
gccccccaaaatgcctaacccaggaccttggaaattctac

SEQ ID NO: 30491 - DNA, 40 bp, Artificial Sequence
  Description of Artificial Sequence: Synthetic primer
attagccctttaatatctacctgtattcagactggaactc

SEQ ID NO: 30492 - DNA, 40 bp, Artificial Sequence
  Description of Artificial Sequence: Synthetic primer
aagtctttttggtgattgttaaagcaagatgtgtataaag

SEQ ID NO: 30493 - DNA, 40 bp, Artificial Sequence
  Description of Artificial Sequence: Synthetic primer
tgcccctgctgtgcagcctccatgcagggctttatttacc

SEQ ID NO: 30494 - DNA, 40 bp, Artificial Sequence
  Description of Artificial Sequence: Synthetic primer
ttgaagttaaattccttcaagttagcacattaatggagac

SEQ ID NO: 30495 - DNA, 40 bp, Artificial Sequence
  Description of Artificial Sequence: Synthetic primer
gcaacagctgttttgttggggctatagatttaagttaggc

SEQ ID NO: 30496 - DNA, 40 bp, Artificial Sequence
  Description of Artificial Sequence: Synthetic primer
ggtccagctaccgcattccctggcataatatacaaagagc

SEQ ID NO: 30497 - DNA, 40 bp, Artificial Sequence
  Description of Artificial Sequence: Synthetic primer
caccctcccctcctcttctgcttctatctccaccactcag

SEQ ID NO: 30498 - DNA, 40 bp, Artificial Sequence
  Description of Artificial Sequence: Synthetic primer
cacaatcttcacaaatggaactacaatagaaaaataaatc

SEQ ID NO: 30499 - DNA, 40 bp, Artificial Sequence
  Description of Artificial Sequence: Synthetic primer
gaggcgacaacccccgggaggcattagaagggatttttcc

SEQ ID NO: 30500 - DNA, 40 bp, Artificial Sequence
  Description of Artificial Sequence: Synthetic primer
atcctatatcattaaaagaacataagttatcatggtgttg

SEQ ID NO: 30501 - DNA, 40 bp, Artificial Sequence
  Description of Artificial Sequence: Synthetic primer
tacaaacgtatggaatgcttcttaaaggggaactgtcaag

SEQ ID NO: 30502 - DNA, 40 bp, Artificial Sequence
  Description of Artificial Sequence: Synthetic primer
cggggccagaggctcagcggctcccaggtgcgggagagag

SEQ ID NO: 30503 - DNA, 40 bp, Artificial Sequence
  Description of Artificial Sequence: Synthetic primer
agctgttaaatcactcacccaggccagacttctttctcag

SEQ ID NO: 30504 - DNA, 40 bp, Artificial Sequence
  Description of Artificial Sequence: Synthetic primer
gggcctgcgccacctgcccgtggtgaacgctgtgggagag

SEQ ID NO: 30505 - DNA, 40 bp, Artificial Sequence
  Description of Artificial Sequence: Synthetic primer
acaagatattcaggatctcagtctacacattgaggggttg

SEQ ID NO: 30506 - DNA, 40 bp, Artificial Sequence
  Description of Artificial Sequence: Synthetic primer
gccacccgaaaggctccggtcgggggcgggaacaggatcg

SEQ ID NO: 30507 - DNA, 40 bp, Artificial Sequence
  Description of Artificial Sequence: Synthetic primer
ttgttcctgatatagatgaaattgcagctcaggcagaaac

SEQ ID NO: 30508 - DNA, 40 bp, Artificial Sequence
  Description of Artificial Sequence: Synthetic primer
tttggatccctcactggaggcttaatgatgtttatcagag

SEQ ID NO: 30509 - DNA, 40 bp, Artificial Sequence
  Description of Artificial Sequence: Synthetic primer
catgcgggctggagtacagacaggtgatcgaatcatcaag

SEQ ID NO: 30510 - DNA, 40 bp, Artificial Sequence
  Description of Artificial Sequence: Synthetic primer
tctttagatgtcatatcaggtcaccctggctcccaagacc

SEQ ID NO: 30511 - DNA, 40 bp, Artificial Sequence
  Description of Artificial Sequence: Synthetic primer
ggcggggccacgggcgccaacagggccgacaggaccggtg

SEQ ID NO: 30512 - DNA, 40 bp, Artificial Sequence
  Description of Artificial Sequence: Synthetic primer
ctcgtacacctctgtgtccatgggtagggcttctctctgg

SEQ ID NO: 30513 - DNA, 40 bp, Artificial Sequence
  Description of Artificial Sequence: Synthetic primer
tggtcacaactccatctaataaagagcttacttgagtatc

SEQ ID NO: 30514 - DNA, 40 bp, Artificial Sequence
  Description of Artificial Sequence: Synthetic primer
aaataataataatttaatgtgaatgggttctgagctctcc

SEQ ID NO: 30515 - DNA, 40 bp, Artificial Sequence
  Description of Artificial Sequence: Synthetic primer
gtccccagagcatcttctcagatctaatcttgctctctgc

SEQ ID NO: 30516 - DNA, 40 bp, Artificial Sequence
  Description of Artificial Sequence: Synthetic primer
atttcaaaagttgcattaaatgtgctgtagagattaaaac

SEQ ID NO: 30517 - DNA, 40 bp, Artificial Sequence
  Description of Artificial Sequence: Synthetic primer
aaggccaaagcgcgctcggcatttcttaggagcgctcagg

SEQ ID NO: 30518 - DNA, 40 bp, Artificial Sequence
  Description of Artificial Sequence: Synthetic primer
ctttgtttttccaaagatggacagtgattaagttttggtg

SEQ ID NO: 30519 - DNA, 40 bp, Artificial Sequence
  Description of Artificial Sequence: Synthetic primer
tctgaattcactaagccaagtggccaaacagaaagagaac

SEQ ID NO: 30520 - DNA, 40 bp, Artificial Sequence
  Description of Artificial Sequence: Synthetic primer
gtgatgatgatcagatgtctaacgataaggagcggtttgc

SEQ ID NO: 30521 - DNA, 40 bp, Artificial Sequence
  Description of Artificial Sequence: Synthetic primer
cagtctgaacctggagattactggaattgttttccaagag

SEQ ID NO: 30522 - DNA, 40 bp, Artificial Sequence
  Description of Artificial Sequence: Synthetic primer
gccaggagggtgctggggacagccctggatcacagttttc

SEQ ID NO: 30523 - DNA, 40 bp, Artificial Sequence
  Description of Artificial Sequence: Synthetic primer
ttaatctcttaacatacaaagataggaaaactctctgatg

SEQ ID NO: 30524 - DNA, 40 bp, Artificial Sequence
  Description of Artificial Sequence: Synthetic primer
gcacaggtttctttgagtagattacataaatgccttgtgg

SEQ ID NO: 30525 - DNA, 40 bp, Artificial Sequence
  Description of Artificial Sequence: Synthetic primer
acacctgcgtcacccagaaggcccgatcacccatctcagc

SEQ ID NO: 30526 - DNA, 40 bp, Artificial Sequence
  Description of Artificial Sequence: Synthetic primer
ctgcagcatcatgcctgggttgggcagacacactggtttc

SEQ ID NO: 30527 - DNA, 40 bp, Artificial Sequence
  Description of Artificial Sequence: Synthetic primer
gtcggggtaccgcgggtagtcctcggccatctcggcatag

SEQ ID NO: 30528 - DNA, 40 bp, Artificial Sequence
  Description of Artificial Sequence: Synthetic primer
actctccctcacaaggaatcagagagtcaccagagctttc

SEQ ID NO: 30529 - DNA, 40 bp, Artificial Sequence
  Description of Artificial Sequence: Synthetic primer
gggatctgccagacccatctcagtgccacgacctctgaac

SEQ ID NO: 30530 - DNA, 40 bp, Artificial Sequence
  Description of Artificial Sequence: Synthetic primer
cgcaatgaggagaagcgcatcactgaggcagagaagaacg

SEQ ID NO: 30531 - DNA, 40 bp, Artificial Sequence
  Description of Artificial Sequence: Synthetic primer
ggccgtggaagggggacacgtgaatatggcattctctcag

SEQ ID NO: 30532 - DNA, 40 bp, Artificial Sequence
  Description of Artificial Sequence: Synthetic primer
gtggaaatagtaatataccatgccgtctctaaaagaccag

SEQ ID NO: 30533 - DNA, 40 bp, Artificial Sequence
  Description of Artificial Sequence: Synthetic primer
gctgcagcagagcggacgggtgttcatggtgaccgactac

SEQ ID NO: 30534 - DNA, 40 bp, Artificial Sequence
  Description of Artificial Sequence: Synthetic primer
tggcaagtctctctttatccgcagagctctgctcatcatc

SEQ ID NO: 30535 - DNA, 40 bp, Artificial Sequence
  Description of Artificial Sequence: Synthetic primer
tactctgagatccagactactcagctgggagaagaagagg

SEQ ID NO: 30536 - DNA, 40 bp, Artificial Sequence
  Description of Artificial Sequence: Synthetic primer
aatattcttgaaaacaggtttaccttctaccttactagcc

SEQ ID NO: 30537 - DNA, 40 bp, Artificial Sequence
  Description of Artificial Sequence: Synthetic primer
ccctctggtcctcgtggtctccctggcccccctggtgcac

SEQ ID NO: 30538 - DNA, 40 bp, Artificial Sequence
  Description of Artificial Sequence: Synthetic primer
aattcaatgcttgcaggtagtatcagctcaggcccagaag

SEQ ID NO: 30539 - DNA, 40 bp, Artificial Sequence
  Description of Artificial Sequence: Synthetic primer
ccaccaaagatcggaactccaacaagaccctgccctctac

SEQ ID NO: 30540 - DNA, 40 bp, Artificial Sequence
  Description of Artificial Sequence: Synthetic primer
gagcccagctgtgcatctgggagaggcaggtgttcccttc

SEQ ID NO: 30541 - DNA, 40 bp, Artificial Sequence
  Description of Artificial Sequence: Synthetic primer
aactttttttcccccactgaaatgcggtaaggctcaaagc

SEQ ID NO: 30542 - DNA, 40 bp, Artificial Sequence
  Description of Artificial Sequence: Synthetic primer
ctcatgtgcattgtgatcgggaatgaggtggtcaacttcg

SEQ ID NO: 30543 - DNA, 40 bp, Artificial Sequence
  Description of Artificial Sequence: Synthetic primer
gaccctacggagctggcaggagaaggcattggggaaagag

SEQ ID NO: 30544 - DNA, 40 bp, Artificial Sequence
  Description of Artificial Sequence: Synthetic primer
atcgtgcaggtattttccactcatggcactctctaacagc

SEQ ID NO: 30545 - DNA, 40 bp, Artificial Sequence
  Description of Artificial Sequence: Synthetic primer
catgcagaagatcctctttccatcaccttcatggaccaac

SEQ ID NO: 30546 - DNA, 40 bp, Artificial Sequence
  Description of Artificial Sequence: Synthetic primer
actttcacgatggccgtaaagcacagcagcacatcgagac

SEQ ID NO: 30547 - DNA, 40 bp, Artificial Sequence
  Description of Artificial Sequence: Synthetic primer
catcactccaatccagaaaggcttcctcttcatctttggc

SEQ ID NO: 30548 - DNA, 40 bp, Artificial Sequence
  Description of Artificial Sequence: Synthetic primer
gaatctgatgactttgagctgtctggctctggagatctgg

SEQ ID NO: 30549 - DNA, 40 bp, Artificial Sequence
  Description of Artificial Sequence: Synthetic primer
accagaggacgggatctctctcggtgtgatttttgctgac

SEQ ID NO: 30550 - DNA, 40 bp, Artificial Sequence
  Description of Artificial Sequence: Synthetic primer
gcggggggcccgtgtcttggaggctgccttcttcggaatg

SEQ ID NO: 30551 - DNA, 40 bp, Artificial Sequence
  Description of Artificial Sequence: Synthetic primer
gaggatccactccatgaccatcgaggctcccatcacaaag

SEQ ID NO: 30552 - DNA, 40 bp, Artificial Sequence
  Description of Artificial Sequence: Synthetic primer
gacccagcagctccaggcttcctgaacatgaaattaatag

SEQ ID NO: 30553 - DNA, 40 bp, Artificial Sequence
  Description of Artificial Sequence: Synthetic primer
gagatacgaagactatggaatgactcccccgacgggtcca

SEQ ID NO: 30554 - DNA, 40 bp, Artificial Sequence
  Description of Artificial Sequence: Synthetic primer
gaaagaacctgtgccaatgtccttgcctccagccttggtg

SEQ ID NO: 30555 - DNA, 40 bp, Artificial Sequence
  Description of Artificial Sequence: Synthetic primer
agtcagctgccgttgttttaaggtatgcagagtattttcc

SEQ ID NO: 30556 - DNA, 40 bp, Artificial Sequence
  Description of Artificial Sequence: Synthetic primer
cactggagcatatttctctagtctggtaagcatcagaatg

SEQ ID NO: 30557 - DNA, 40 bp, Artificial Sequence
  Description of Artificial Sequence: Synthetic primer
aaaaaaagaatgagtaatgtgatcgcttggttatccagaa

SEQ ID NO: 30558 - DNA, 40 bp, Artificial Sequence
  Description of Artificial Sequence: Synthetic primer
cagctaaaggttaaaaccagttctaagaggtgatctcagg

SEQ ID NO: 30559 - DNA, 40 bp, Artificial Sequence
  Description of Artificial Sequence: Synthetic primer
gcagcactactcagacatcttcaccaccacagagcccatc

SEQ ID NO: 30560 - DNA, 40 bp, Artificial Sequence
  Description of Artificial Sequence: Synthetic primer
atgaagagattaatggcagagtgcctcaaaaagaaaagag

SEQ ID NO: 30561 - DNA, 40 bp, Artificial Sequence
  Description of Artificial Sequence: Synthetic primer
gtgagagagcatctccccctggtccatgcccctcctgtgc

SEQ ID NO: 30562 - DNA, 40 bp, Artificial Sequence
  Description of Artificial Sequence: Synthetic primer
agctgcgggcagagaaggccagctatgcagagcagctgag

SEQ ID NO: 30563 - DNA, 40 bp, Artificial Sequence
  Description of Artificial Sequence: Synthetic primer
caattcagctcgactagaatcctccagtagccaagattcc

SEQ ID NO: 30564 - DNA, 40 bp, Artificial Sequence
  Description of Artificial Sequence: Synthetic primer
ctttgtataatacattgcatctgtgttttcaatttttcaa

SEQ ID NO: 30565 - DNA, 40 bp, Artificial Sequence
  Description of Artificial Sequence: Synthetic primer
actttccaaaaagaaaaatggaaactattgtgtccttcag

SEQ ID NO: 30566 - DNA, 40 bp, Artificial Sequence
  Description of Artificial Sequence: Synthetic primer
ccaggagtggataataagactggctcagtttccggtattg

SEQ ID NO: 30567 - DNA, 40 bp, Artificial Sequence
  Description of Artificial Sequence: Synthetic primer
ggtgggggtctggcttcagggtctcagtccttccctttag

SEQ ID NO: 30568 - DNA, 40 bp, Artificial Sequence
  Description of Artificial Sequence: Synthetic primer
cctctttatggtgacattggtttggggtgcagatctttag

SEQ ID NO: 30569 - DNA, 40 bp, Artificial Sequence
  Description of Artificial Sequence: Synthetic primer
cccaagatgttgtttacacgaggggcttcataacggattc

SEQ ID NO: 30570 - DNA, 40 bp, Artificial Sequence
  Description of Artificial Sequence: Synthetic primer
agtccacacaagtaccccctccgacaaaaatttactggac

SEQ ID NO: 30571 - DNA, 40 bp, Artificial Sequence
  Description of Artificial Sequence: Synthetic primer
acatttcaagaacgggcagggggccggggtggttctggag

SEQ ID NO: 30572 - DNA, 40 bp, Artificial Sequence
  Description of Artificial Sequence: Synthetic primer
tgtgccccccacatctgaagacctgctatcccctggagtc

SEQ ID NO: 30573 - DNA, 40 bp, Artificial Sequence
  Description of Artificial Sequence: Synthetic primer
gcaaggagagaacctctagctccttgtcggtggtgttagc

SEQ ID NO: 30574 - DNA, 40 bp, Artificial Sequence
  Description of Artificial Sequence: Synthetic primer
ggtggtgctgcacagcttcacgcagctagaccccgacctg

SEQ ID NO: 30575 - DNA, 40 bp, Artificial Sequence
  Description of Artificial Sequence: Synthetic primer
caaatccacaataattgatctatttcttcttagatggttg

SEQ ID NO: 30576 - DNA, 40 bp, Artificial Sequence
  Description of Artificial Sequence: Synthetic primer
gaaacaagagtctgtagcttctgaacttctgattttaatg

SEQ ID NO: 30577 - DNA, 40 bp, Artificial Sequence
  Description of Artificial Sequence: Synthetic primer
ctcaaggatttgcgtttcttaggaatctcttgttactttg

SEQ ID NO: 30578 - DNA, 40 bp, Artificial Sequence
  Description of Artificial Sequence: Synthetic primer
ccgctcgctccgatactattatgagaaaggcatcatgcag

SEQ ID NO: 30579 - DNA, 40 bp, Artificial Sequence
  Description of Artificial Sequence: Synthetic primer
aacctcattatttttcgagcagcttgatcctgctttttgg

SEQ ID NO: 30580 - DNA, 40 bp, Artificial Sequence
  Description of Artificial Sequence: Synthetic primer
atgatttccgaaatggcttatgccgcaatcttgtttgcac

SEQ ID NO: 30581 - DNA, 40 bp, Artificial Sequence
  Description of Artificial Sequence: Synthetic primer
tggcggggggagcatttccttctttgaggactgtgaggag

SEQ ID NO: 30582 - DNA, 40 bp, Artificial Sequence
  Description of Artificial Sequence: Synthetic primer
agattcttgctctcctttcattttctctacttttgataac

SEQ ID NO: 30583 - DNA, 40 bp, Artificial Sequence
  Description of Artificial Sequence: Synthetic primer
catagctgtaaatgaaaacaatgtgtggcaaaatacaaag

SEQ ID NO: 30584 - DNA, 40 bp, Artificial Sequence
  Description of Artificial Sequence: Synthetic primer
tgctcattggagtcatcaataatacataaatgaacacctg

SEQ ID NO: 30585 - DNA, 40 bp, Artificial Sequence
  Description of Artificial Sequence: Synthetic primer
taaagagagccaagcagaagaggaggcgagaagcatgaag

SEQ ID NO: 30586 - DNA, 40 bp, Artificial Sequence
  Description of Artificial Sequence: Synthetic primer
ctggcagcagctcgagaagcatgtcctccacgccgtcaat

SEQ ID NO: 30587 - DNA, 40 bp, Artificial Sequence
  Description of Artificial Sequence: Synthetic primer
tatatataattacaaaaactcgcgctatggggtatcttcg

SEQ ID NO: 30588 - DNA, 40 bp, Artificial Sequence
  Description of Artificial Sequence: Synthetic primer
tttaaaaaatgtcttcttattttggtttcaggttgaagtc

SEQ ID NO: 30589 - DNA, 40 bp, Artificial Sequence
  Description of Artificial Sequence: Synthetic primer
cctggaaggagacctcgtcctcgtcggcggcgctgtagtc

SEQ ID NO: 30590 - DNA, 40 bp, Artificial Sequence
  Description of Artificial Sequence: Synthetic primer
ggtcccagagaacatctttttagttgggtgatggagtgtc

SEQ ID NO: 30591 - DNA, 40 bp, Artificial Sequence
  Description of Artificial Sequence: Synthetic primer
atgttcataagcagcttgatttccagggttcctaagtaag

SEQ ID NO: 30592 - DNA, 40 bp, Artificial Sequence
  Description of Artificial Sequence: Synthetic primer
ggagtcgttgctgggagacatggaatggaggctcacaaag

SEQ ID NO: 30593 - DNA, 40 bp, Artificial Sequence
  Description of Artificial Sequence: Synthetic primer
tccaagacagattttcggaacacatttccctaccctaaag

SEQ ID NO: 30594 - DNA, 40 bp, Artificial Sequence
  Description of Artificial Sequence: Synthetic primer
ctcacgttggcagatgtcaagcacgtcttcagattgtgtg

SEQ ID NO: 30595 - DNA, 40 bp, Artificial Sequence
  Description of Artificial Sequence: Synthetic primer
ctcaaccagatgcagtatgagtacacggagctcaagaaac

SEQ ID NO: 30596 - DNA, 40 bp, Artificial Sequence
  Description of Artificial Sequence: Synthetic primer
ccaaaatcaccaccacctccacctacatttctgcctctac

SEQ ID NO: 30597 - DNA, 40 bp, Artificial Sequence
  Description of Artificial Sequence: Synthetic primer
ccacacccccaccgacagctgcaccggcagccaggctttg

SEQ ID NO: 30598 - DNA, 40 bp, Artificial Sequence
  Description of Artificial Sequence: Synthetic primer
aataaagtgaggcaggaaaatgcttctccttttaaaatcc

SEQ ID NO: 30599 - DNA, 40 bp, Artificial Sequence
  Description of Artificial Sequence: Synthetic primer
ctgcaagaagctgaagctgtgttatatgagcatttatttg

SEQ ID NO: 30600 - DNA, 40 bp, Artificial Sequence
  Description of Artificial Sequence: Synthetic primer
agagaaaaaagtaaaagagagctattgcacttaacactgg

SEQ ID NO: 30601 - DNA, 40 bp, Artificial Sequence
  Description of Artificial Sequence: Synthetic primer
cggtgcgctgcacgctgcgcaacgctgtgggccaggacac

SEQ ID NO: 30602 - DNA, 40 bp, Artificial Sequence
  Description of Artificial Sequence: Synthetic primer
tctcgaacatgcaaagatcctatagaagatataaactctc

SEQ ID NO: 30603 - DNA, 40 bp, Artificial Sequence
  Description of Artificial Sequence: Synthetic primer
tcgatgccttctcggaactttcctttaaacagtgcccaag

SEQ ID NO: 30604 - DNA, 40 bp, Artificial Sequence
  Description of Artificial Sequence: Synthetic primer
agtgtggtgggtggctaggaggagtggaaagacactgatg

SEQ ID NO: 30605 - DNA, 40 bp, Artificial Sequence
  Description of Artificial Sequence: Synthetic primer
tttgcatcacagtcacatgcccattcacaccacacagagg

SEQ ID NO: 30606 - DNA, 40 bp, Artificial Sequence
  Description of Artificial Sequence: Synthetic primer
gaccaggagctccattttcaccagggctgccaggctcacc

SEQ ID NO: 30607 - DNA, 40 bp, Artificial Sequence
  Description of Artificial Sequence: Synthetic primer
agccaagcagaaagaaacacgcgacatggactctgtcaag

SEQ ID NO: 30608 - DNA, 40 bp, Artificial Sequence
  Description of Artificial Sequence: Synthetic primer
agccgaacatcatctggtctgcctgcagagacctcaaaag

SEQ ID NO: 30609 - DNA, 40 bp, Artificial Sequence
  Description of Artificial Sequence: Synthetic primer
agtggattcctccccaccctgtcccaggcagcgccactgt

SEQ ID NO: 30610 - DNA, 40 bp, Artificial Sequence
  Description of Artificial Sequence: Synthetic primer
ttagagaggactctctgagcttctgcagcaacttccttag

SEQ ID NO: 30611 - DNA, 40 bp, Artificial Sequence
  Description of Artificial Sequence: Synthetic primer
gcgaggtgcggcctccaatctccccatttctcgtctccac

SEQ ID NO: 30612 - DNA, 40 bp, Artificial Sequence
  Description of Artificial Sequence: Synthetic primer
ccgcagcggcacggccagcggaggcagcaccccgcacctg

SEQ ID NO: 30613 - DNA, 40 bp, Artificial Sequence
  Description of Artificial Sequence: Synthetic primer
ctggagcccaaggagcttgaggagctgcgtgacaagaatg

SEQ ID NO: 30614 - DNA, 40 bp, Artificial Sequence
  Description of Artificial Sequence: Synthetic primer
ataccaaaatttctacccagctagattttgcttctaaacg

SEQ ID NO: 30615 - DNA, 40 bp, Artificial Sequence
  Description of Artificial Sequence: Synthetic primer
ctgctttagaatccaatttccaataaatttcaggtgtttc

SEQ ID NO: 30616 - DNA, 40 bp, Artificial Sequence
  Description of Artificial Sequence: Synthetic primer
actgacaactgcagatgtcaaaacacatttgtgggtcacg

SEQ ID NO: 30617 - DNA, 40 bp, Artificial Sequence
  Description of Artificial Sequence: Synthetic primer
tgctggaaagcctcaatccaggaaagagtggctatgtgac

SEQ ID NO: 30618 - DNA, 40 bp, Artificial Sequence
  Description of Artificial Sequence: Synthetic primer
catcaggaccatttccttgaggctgttgtgctcctcacac

SEQ ID NO: 30619 - DNA, 40 bp, Artificial Sequence
  Description of Artificial Sequence: Synthetic primer
cccagacaaaatcaccaacagcggccagagaaggaaaaag

SEQ ID NO: 30620 - DNA, 40 bp, Artificial Sequence
  Description of Artificial Sequence: Synthetic primer
acattgtgctgctagaaataatgtcattctcaattaaaag

SEQ ID NO: 30621 - DNA, 40 bp, Artificial Sequence
  Description of Artificial Sequence: Synthetic primer
aggcccggggaccctgcctctctatgacctgcagcaccac

SEQ ID NO: 30622 - DNA, 40 bp, Artificial Sequence
  Description of Artificial Sequence: Synthetic primer
tcaaaatggaatgtaaccctagccaggtgaatggctcaag

SEQ ID NO: 30623 - DNA, 40 bp, Artificial Sequence
  Description of Artificial Sequence: Synthetic primer
cccggcaaggctggagagcgaggtgttcccggaccccctg

SEQ ID NO: 30624 - DNA, 40 bp, Artificial Sequence
  Description of Artificial Sequence: Synthetic primer
aggaaattttgttataaaaatttgtgagttgactgtttgg

SEQ ID NO: 30625 - DNA, 40 bp, Artificial Sequence
  Description of Artificial Sequence: Synthetic primer
cgtacgctgagtcaaagagggactggtcgtcgctcaccac

SEQ ID NO: 30626 - DNA, 40 bp, Artificial Sequence
  Description of Artificial Sequence: Synthetic primer
tatatacatgacaccagtaggttccttggtgttccaaatc

SEQ ID NO: 30627 - DNA, 40 bp, Artificial Sequence
  Description of Artificial Sequence: Synthetic primer
cctgtcctgtatataacagcactgtagcaataaacgtgac

SEQ ID NO: 30628 - DNA, 40 bp, Artificial Sequence
  Description of Artificial Sequence: Synthetic primer
aagtttattatggtgaagaaagcagaagaaagaacagtag

SEQ ID NO: 30629 - DNA, 40 bp, Artificial Sequence
  Description of Artificial Sequence: Synthetic primer
agacacggtgtatgttcctgcagtcctggaatcccttacc

SEQ ID NO: 30630 - DNA, 40 bp, Artificial Sequence
  Description of Artificial Sequence: Synthetic primer
aaaaaatctacttttaagcaaagcaagttgtcttccttag

SEQ ID NO: 30631 - DNA, 40 bp, Artificial Sequence
  Description of Artificial Sequence: Synthetic primer
atcccagggtcaagaaatttcaggaaaccgaagacaacag

SEQ ID NO: 30632 - DNA, 40 bp, Artificial Sequence
  Description of Artificial Sequence: Synthetic primer
agcctttgtgctctatagcagacactaaagactgggttac

SEQ ID NO: 30633 - DNA, 40 bp, Artificial Sequence
  Description of Artificial Sequence: Synthetic primer
gcaatgctgatgtttgataaaactaccaacaggcacagag

SEQ ID NO: 30634 - DNA, 40 bp, Artificial Sequence
  Description of Artificial Sequence: Synthetic primer
ttacaatgcatttgtcaattcagtttaggcacaaggcaac

SEQ ID NO: 30635 - DNA, 40 bp, Artificial Sequence
  Description of Artificial Sequence: Synthetic primer
ctccactctgcacgctcatagtcagaggagatcaggaacg

SEQ ID NO: 30636 - DNA, 40 bp, Artificial Sequence
  Description of Artificial Sequence: Synthetic primer
accatctattttgtgaactttgttagtcatcttttatttg

SEQ ID NO: 30637 - DNA, 40 bp, Artificial Sequence
  Description of Artificial Sequence: Synthetic primer
cagcctgcttgctctgggaaggtagctttctttgtacacc

SEQ ID NO: 30638 - DNA, 40 bp, Artificial Sequence
  Description of Artificial Sequence: Synthetic primer
atagtgagatgaaccaagcatcaacgcgaacagagaaacg

SEQ ID NO: 30639 - DNA, 40 bp, Artificial Sequence
  Description of Artificial Sequence: Synthetic primer
atcgacagacatagaccactataggttttctttccttgtg

SEQ ID NO: 30640 - DNA, 40 bp, Artificial Sequence
  Description of Artificial Sequence: Synthetic primer
gtgctttgcatatcagttgatgtatctcaagactataacc

SEQ ID NO: 30641 - DNA, 40 bp, Artificial Sequence
  Description of Artificial Sequence: Synthetic primer
tccggactttctcagggcccccgcgacacacacagcattc

SEQ ID NO: 30642 - DNA, 40 bp, Artificial Sequence
  Description of Artificial Sequence: Synthetic primer
acccctagagagctaggatttccaagtccaacgggtgctc

SEQ ID NO: 30643 - DNA, 40 bp, Artificial Sequence
  Description of Artificial Sequence: Synthetic primer
cattgttgctgagttaaattccagggtctcagatggttag

SEQ ID NO: 30644 - DNA, 40 bp, Artificial Sequence
  Description of Artificial Sequence: Synthetic primer
ttgagcccatctgggatgtgctggaaagtggaggactagg

SEQ ID NO: 30645 - DNA, 40 bp, Artificial Sequence
  Description of Artificial Sequence: Synthetic primer
caccacggtggttaccagagacacaaggaggctctctaag

SEQ ID NO: 30646 - DNA, 40 bp, Artificial Sequence
  Description of Artificial Sequence: Synthetic primer
ccacgcgtacccgggcgccggcgtggcccacgacgagctg

SEQ ID NO: 30647 - DNA, 40 bp, Artificial Sequence
  Description of Artificial Sequence: Synthetic primer
cagggatcttcaggaacttctgacctcaccaagtcaagtg

SEQ ID NO: 30648 - DNA, 40 bp, Artificial Sequence
  Description of Artificial Sequence: Synthetic primer
ttttatgaagttgtgtatcttaataaaaaggactgaatta

SEQ ID NO: 30649 - DNA, 40 bp, Artificial Sequence
  Description of Artificial Sequence: Synthetic primer
gcttccattgttagcatcgtacacgattgtgatttttatg

SEQ ID NO: 30650 - DNA, 40 bp, Artificial Sequence
  Description of Artificial Sequence: Synthetic primer
ctcgcctccccttctcttcaagctgcagtattcctgactg

SEQ ID NO: 30651 - DNA, 40 bp, Artificial Sequence
  Description of Artificial Sequence: Synthetic primer
aaaaacaaaagagaactgaatgtcatcattagtaacaaag

SEQ ID NO: 30652 - DNA, 40 bp, Artificial Sequence
  Description of Artificial Sequence: Synthetic primer
tcacaattatatttctttatttttgcctttgagcagtttc

SEQ ID NO: 30653 - DNA, 40 bp, Artificial Sequence
  Description of Artificial Sequence: Synthetic primer
ctgtgcaaacgtaggtgtttctgcgggtcatcatgctagg

SEQ ID NO: 30654 - DNA, 40 bp, Artificial Sequence
  Description of Artificial Sequence: Synthetic primer
cggttctgtaagtcctctaagttggaggcattccattctg

SEQ ID NO: 30655 - DNA, 40 bp, Artificial Sequence
  Description of Artificial Sequence: Synthetic primer
ctggtcactcaccaatcaatagagcaccaaacctacacag

SEQ ID NO: 30656 - DNA, 40 bp, Artificial Sequence
  Description of Artificial Sequence: Synthetic primer
tcttaatgttttactaatcctgtcagttaaaaatggtgac

SEQ ID NO: 30657 - DNA, 40 bp, Artificial Sequence
  Description of Artificial Sequence: Synthetic primer
tctcaagaaattcctctcaaaacataatggaggccaaatg

SEQ ID NO: 30658 - DNA, 40 bp, Artificial Sequence
  Description of Artificial Sequence: Synthetic primer
gagacctgcctgaatggcgggaagtgtgaagcggccaatg

SEQ ID NO: 30659 - DNA, 40 bp, Artificial Sequence
  Description of Artificial Sequence: Synthetic primer
tatttatatttatttgaaaaccaaaacaaacaaaaagttg

SEQ ID NO: 30660 - DNA, 40 bp, Artificial Sequence; identical to SEQ ID NO: 17570
  Description of Artificial Sequence: Synthetic primer

SEQ ID NO: 30661 - DNA, 40 bp, Artificial Sequence
  Description of Artificial Sequence: Synthetic primer
ccacgatgaaatgtgcagatcaggcacggtgaataccaag

SEQ ID NO: 30662 - DNA, 40 bp, Artificial Sequence
  Description of Artificial Sequence: Synthetic primer
tcctcacgatttcgttttcttctggctggaagctcttcat

SEQ ID NO: 30663 - DNA, 40 bp, Artificial Sequence
  Description of Artificial Sequence: Synthetic primer
gaaacaagcaaaaagagaattatctgtaatgttgtaattt

SEQ ID NO: 30664 - DNA, 40 bp, Artificial Sequence
  Description of Artificial Sequence: Synthetic primer
agctgcgcaacagctccttccacttcctgcgggagctcag

SEQ ID NO: 30665 - DNA, 40 bp, Artificial Sequence
  Description of Artificial Sequence: Synthetic primer
attctttccagggggacctgggggacctcggggacccatg

SEQ ID NO: 30666 - DNA, 40 bp, Artificial Sequence
  Description of Artificial Sequence: Synthetic primer
ctccaacttcatacttcagtggcgtagactttttcttagg

SEQ ID NO: 30667 - DNA, 40 bp, Artificial Sequence
  Description of Artificial Sequence: Synthetic primer
gccctggccaagctttttccaggggcacaatggggaccag

SEQ ID NO: 30668 - DNA, 40 bp, Artificial Sequence
  Description of Artificial Sequence: Synthetic primer
caccagtcctctgacaagtttgtctcggagctgtggaagg

SEQ ID NO: 30669 - DNA, 40 bp, Artificial Sequence
  Description of Artificial Sequence: Synthetic primer
tatggatgatcgagaggatctggtgtaccaggcgaagctg

SEQ ID NO: 30670 - DNA, 40 bp, Artificial Sequence
  Description of Artificial Sequence: Synthetic primer
aatctggtgaaaatggaaaagaagagacacagtatgaaag

SEQ ID NO: 30671 - DNA, 40 bp, Artificial Sequence
  Description of Artificial Sequence: Synthetic primer
gcggggttggggtctacggacaaaaacagatattaaaaag

SEQ ID NO: 30672 - DNA, 40 bp, Artificial Sequence
  Description of Artificial Sequence: Synthetic primer
acccttagacctgtagatagtgatatcgtaatattaattg

SEQ ID NO: 30673 - DNA, 40 bp, Artificial Sequence
  Description of Artificial Sequence: Synthetic primer
cgccgcggccatggcggacagcgccagcgagagcgacacg

SEQ ID NO: 30674 - DNA, 40 bp, Artificial Sequence
  Description of Artificial Sequence: Synthetic primer
acagcactgctgagagctacatctgggaagccccctgagc

SEQ ID NO: 30675 - DNA, 40 bp, Artificial Sequence
  Description of Artificial Sequence: Synthetic primer
agggcagtcattggggaggtaagagcccaatattctttcc

SEQ ID NO: 30676 - DNA, 40 bp, Artificial Sequence
  Description of Artificial Sequence: Synthetic primer
atctacttcctggaggagcgcatgcaacagaagtatgagg

SEQ ID NO: 30677 - DNA, 40 bp, Artificial Sequence
  Description of Artificial Sequence: Synthetic primer
ggtggcagacatgttgcactgaagcagaggagatgtgagg

SEQ ID NO: 30678 - DNA, 40 bp, Artificial Sequence
  Description of Artificial Sequence: Synthetic primer
aagaagaaaagaaaagctgtgcaaattcatagtaaagttc

SEQ ID NO: 30679 - DNA, 40 bp, Artificial Sequence
  Description of Artificial Sequence: Synthetic primer
aggagggagccaagagaccaagttccggccaaagggtcag

SEQ ID NO: 30680 - DNA, 40 bp, Artificial Sequence
  Description of Artificial Sequence: Synthetic primer
cgcgtggagcgggagctcacctgtctgcaagggggactcg

SEQ ID NO: 30681 - DNA, 40 bp, Artificial Sequence
  Description of Artificial Sequence: Synthetic primer
tctggtccagtgtttcacggcgaaagtcgtcgaagttatc

SEQ ID NO: 30682 - DNA, 40 bp, Artificial Sequence
  Description of Artificial Sequence: Synthetic primer
aagatgaatcactaatctttctaatgcactctgataacac

SEQ ID NO: 30683 - DNA, 40 bp, Artificial Sequence
  Description of Artificial Sequence: Synthetic primer
caaagccaatccaatggtctgcttctgtatctcagtcacc

SEQ ID NO: 30684 - DNA, 40 bp, Artificial Sequence
  Description of Artificial Sequence: Synthetic primer
gcaattttggttacatttgaggaaaaatttcaagaagaac

SEQ ID NO: 30685 - DNA, 40 bp, Artificial Sequence
  Description of Artificial Sequence: Synthetic primer
tcttttaaattaggataataccgcggtttaaaaaatagcc

SEQ ID NO: 30686 - DNA, 40 bp, Artificial Sequence
  Description of Artificial Sequence: Synthetic primer
cagccgcccccggctgcggcggtggcagcggttgctgagg

SEQ ID NO: 30687 - DNA, 40 bp, Artificial Sequence
  Description of Artificial Sequence: Synthetic primer
cggctagtatgcagcaggttcgactgcttcgtgatcttcc

SEQ ID NO: 30688 - DNA, 40 bp, Artificial Sequence
  Description of Artificial Sequence: Synthetic primer
aaccagacttctccgacttcttcagtgtggttggagatgg

SEQ ID NO: 30689 - DNA, 40 bp, Artificial Sequence
  Description of Artificial Sequence: Synthetic primer
gtttgacctctgttgtactgatgtgttgtgactaaataaa

SEQ ID NO: 30690 - DNA, 40 bp, Artificial Sequence
  Description of Artificial Sequence: Synthetic primer
attttgctcacttattttatgggtttctctttcaaagttc

SEQ ID NO: 30691 - DNA, 40 bp, Artificial Sequence
  Description of Artificial Sequence: Synthetic primer
tatttgttctccttttaaggaattatgaagctaagaaaag

SEQ ID NO: 30692 - DNA, 40 bp, Artificial Sequence
  Description of Artificial Sequence: Synthetic primer
aaaaaagaagaaattctaaagacaacttgtttcatctgtg

SEQ ID NO: 30693 - DNA, 40 bp, Artificial Sequence
  Description of Artificial Sequence: Synthetic primer
gtctggaagcacacaccgtcttcagtgtcttctgcatgtc

SEQ ID NO: 30694 - DNA, 40 bp, Artificial Sequence
  Description of Artificial Sequence: Synthetic primer
ggacagtggtcacgtgagccctggcaccttctttgacaag

SEQ ID NO: 30695 - DNA, 40 bp, Artificial Sequence
  Description of Artificial Sequence: Synthetic primer
caggtccctgtgtacaatatttttctggtgacaatagtgc

SEQ ID NO: 30696 - DNA, 40 bp, Artificial Sequence
  Description of Artificial Sequence: Synthetic primer
tgatggagggaggagaccttcttacttatttgcgtaaagc

SEQ ID NO: 30697 - DNA, 40 bp, Artificial Sequence
  Description of Artificial Sequence: Synthetic primer
gatcctcttgctgccgccaccgccgctgctgccactggtc

SEQ ID NO: 30698 - DNA, 40 bp, Artificial Sequence
  Description of Artificial Sequence: Synthetic primer
ctttttttccagtaagaatatcaaggcagaaggtgggaag

SEQ ID NO: 30699 - DNA, 40 bp, Artificial Sequence
  Description of Artificial Sequence: Synthetic primer
aacttgattctgagcacgcggctaatcgaactcactaaac

SEQ ID NO: 30700 - DNA, 40 bp, Artificial Sequence
  Description of Artificial Sequence: Synthetic primer
aggaggtacctctgttcaggctacgtcacttcccttgtgg

SEQ ID NO: 30701 - DNA, 40 bp, Artificial Sequence
  Description of Artificial Sequence: Synthetic primer
agaagatctctacaatgaaatgaagtggcagaagaaaatc

SEQ ID NO: 30702 - DNA, 40 bp, Artificial Sequence
  Description of Artificial Sequence: Synthetic primer
atcgttagccagctgggcctcacccgggatcccctagaag

SEQ ID NO: 30703 - DNA, 40 bp, Artificial Sequence
  Description of Artificial Sequence: Synthetic primer
agaatcatctgtctctggagtgtcaggactgtcacagctg

SEQ ID NO: 30704 - DNA, 40 bp, Artificial Sequence
  Description of Artificial Sequence: Synthetic primer
gcatcccaaggctttgggttttcctctccaaacaaaacag

SEQ ID NO: 30705 - DNA, 40 bp, Artificial Sequence
  Description of Artificial Sequence: Synthetic primer
cagattcttggaccaacaagtagccgccttgcaaatccag

SEQ ID NO: 30706 - DNA, 40 bp, Artificial Sequence
  Description of Artificial Sequence: Synthetic primer
acaacaagagtgtgaatgaggcactcaaccacctgctgac

SEQ ID NO: 30707 - DNA, 40 bp, Artificial Sequence
  Description of Artificial Sequence: Synthetic primer
caccagtaatactttgtctgcaaaccactgcaacatgaac

SEQ ID NO: 30708 - DNA, 40 bp, Artificial Sequence
  Description of Artificial Sequence: Synthetic primer
aatttatatgtatccagtacatttaattgagaagcgtatg

SEQ ID NO: 30709 - DNA, 40 bp, Artificial Sequence
  Description of Artificial Sequence: Synthetic primer
agtgtacagttttaaatagctgcctaaagtcgtgtgtaac

SEQ ID NO: 30710 - DNA, 40 bp, Artificial Sequence
  Description of Artificial Sequence: Synthetic primer
cctaacatgtgagaataaaatgtcttctgtctcctctgtc

SEQ ID NO: 30711 - DNA, 40 bp, Artificial Sequence
  Description of Artificial Sequence: Synthetic primer
tttaagtagaaatggaccatgttttggaagaacccttgac

SEQ ID NO: 30712 - DNA, 40 bp, Artificial Sequence
  Description of Artificial Sequence: Synthetic primer
gcagtgtccatgaagatgaagtgcttgtctttgctgactc

SEQ ID NO: 30713 - DNA, 40 bp, Artificial Sequence
  Description of Artificial Sequence: Synthetic primer
cttcccttcaaggccacatatgtcctgttgagtccaaagc

SEQ ID NO: 30714 - DNA, 40 bp, Artificial Sequence
  Description of Artificial Sequence: Synthetic primer
ggggatagaaacagcctcggaatccataaaaatactcacg

SEQ ID NO: 30715 - DNA, 40 bp, Artificial Sequence
  Description of Artificial Sequence: Synthetic primer
tttgaaatatatttggataagataagggacctgttagatg

SEQ ID NO: 30716 - DNA, 40 bp, Artificial Sequence
  Description of Artificial Sequence: Synthetic primer
cagtttgaaaagaagaaaaatgataccttagaccccgaac

SEQ ID NO: 30717 - DNA, 40 bp, Artificial Sequence
  Description of Artificial Sequence: Synthetic primer
atgaacattctgccgaagagaacaagacgtgtgaagactc

SEQ ID NO: 30718 - DNA, 40 bp, Artificial Sequence
  Description of Artificial Sequence: Synthetic primer
ctgccagcacctgcaggcggagaagaagaagatgcagcag

SEQ ID NO: 30719 - DNA, 40 bp, Artificial Sequence
  Description of Artificial Sequence: Synthetic primer
tttaaacagatataatcaggtagggaagttttccttaatc

SEQ ID NO: 30720 - DNA, 40 bp, Artificial Sequence
  Description of Artificial Sequence: Synthetic primer
ctacttgaccttctagtttagatactttatcagaagaatg

SEQ ID NO: 30721 - DNA, 40 bp, Artificial Sequence
  Description of Artificial Sequence: Synthetic primer
cagaaggtgcagccccctacgccgctactcccttccgtga

SEQ ID NO: 30722 - DNA, 40 bp, Artificial Sequence
  Description of Artificial Sequence: Synthetic primer
gccggccgccccactgaaagcgctggggaaccgagaggtg

SEQ ID NO: 30723 - DNA, 40 bp, Artificial Sequence
  Description of Artificial Sequence: Synthetic primer
gcaagtcttctttggaattttattgttctcttatgcagac

SEQ ID NO: 30724 - DNA, 40 bp, Artificial Sequence
  Description of Artificial Sequence: Synthetic primer
tcgcctctctaccctcacaatgggtaaataaacctagtcc

SEQ ID NO: 30725 - DNA, 40 bp, Artificial Sequence
  Description of Artificial Sequence: Synthetic primer
caaaaaatggactagaagagaagctggctgaggagctgag

SEQ ID NO: 30726 - DNA, 40 bp, Artificial Sequence
  Description of Artificial Sequence: Synthetic primer
ctgagaagagtataataagaacattgtaccctctccacac

SEQ ID NO: 30727 - DNA, 40 bp, Artificial Sequence
  Description of Artificial Sequence: Synthetic primer
tttagctcaagatcaagatttaaaagaaagagctcaaagg

SEQ ID NO: 30728 - DNA, 40 bp, Artificial Sequence
  Description of Artificial Sequence: Synthetic primer
ctgtccctccagagacaaactgccccctgtcccctctagc

SEQ ID NO: 30729 - DNA, 40 bp, Artificial Sequence
  Description of Artificial Sequence: Synthetic primer
agtgaccaatcagatgggtggagtgtgttacagaaattgg

SEQ ID NO: 30730 - DNA, 40 bp, Artificial Sequence
  Description of Artificial Sequence: Synthetic primer
actcaggcagctcggactcggaggaggagcgggccaccag

SEQ ID NO: 30731 - DNA, 40 bp, Artificial Sequence
  Description of Artificial Sequence: Synthetic primer
gcagcgatctcttgcacactctccccattccgaccaagtg

SEQ ID NO: 30732 - DNA, 40 bp, Artificial Sequence
  Description of Artificial Sequence: Synthetic primer
tgattaattcatctggtaagtcgtgctccaagtcaaatag

SEQ ID NO: 30733 - DNA, 40 bp, Artificial Sequence
  Description of Artificial Sequence: Synthetic primer
aggccctggaagagtggccaagattggagacttcgggatg

SEQ ID NO: 30734 - DNA, 40 bp, Artificial Sequence
  Description of Artificial Sequence: Synthetic primer
tcacgtccaggtcgatgtggtggatgtgttcagatgacct

SEQ ID NO: 30735 - DNA, 40 bp, Artificial Sequence
  Description of Artificial Sequence: Synthetic primer
ccactgactggctcccgtacgcactgtcttccttcacctc

SEQ ID NO: 30736 - DNA, 40 bp, Artificial Sequence
  Description of Artificial Sequence: Synthetic primer
tttcatctaacttgtcatgttccaacactacttagctttc

SEQ ID NO: 30737 - DNA, 40 bp, Artificial Sequence
  Description of Artificial Sequence: Synthetic primer
cacgcctgccccaaaccgcgcgggcgtttcccaggtgctg

SEQ ID NO: 30738 - DNA, 40 bp, Artificial Sequence
  Description of Artificial Sequence: Synthetic primer
aaacagtgttaacaggaagtaggctgactgctggctttgg

SEQ ID NO: 30739 - DNA, 40 bp, Artificial Sequence
  Description of Artificial Sequence: Synthetic primer
ctccaattatctcctacttcagttttgattctgtttagcc

SEQ ID NO: 30740 - DNA, 40 bp, Artificial Sequence
  Description of Artificial Sequence: Synthetic primer
ccacaatacttttctgtctctttgtcatacttctttttgg

SEQ ID NO: 30741 - DNA, 40 bp, Artificial Sequence
  Description of Artificial Sequence: Synthetic primer
ccttggtcaaaaagcatgcccagacctttttggccctctg

SEQ ID NO: 30742 - DNA, 40 bp, Artificial Sequence
  Description of Artificial Sequence: Synthetic primer
gctcccacctgtcagccttctaccccatgagaaagaccag

SEQ ID NO: 30743 - DNA, 40 bp, Artificial Sequence
  Description of Artificial Sequence: Synthetic primer
tagcaatgctgtgaataaaaagaaagattttatacccttg

SEQ ID NO: 30744 - DNA, 40 bp, Artificial Sequence
  Description of Artificial Sequence: Synthetic primer
gaattctgataaaattgctaagttttagagtactacacag

SEQ ID NO: 30745 - DNA, 40 bp, Artificial Sequence
  Description of Artificial Sequence: Synthetic primer
tccattaactatgaccttctgaagacagaaaatctgaatg

SEQ ID NO: 30746 - DNA, 40 bp, Artificial Sequence
  Description of Artificial Sequence: Synthetic primer
ggttgctagtaggttctgcttctgcttctctctgctccac

SEQ ID NO: 30747 - DNA, 40 bp, Artificial Sequence
  Description of Artificial Sequence: Synthetic primer
gaaggtgcctccctggccatgagtctcatagacaagaagg

SEQ ID NO: 30748 - DNA, 40 bp, Artificial Sequence
  Description of Artificial Sequence: Synthetic primer
tatgctctgtcactggccaacctgcagatggtactagagc

SEQ ID NO: 30749 - DNA, 40 bp, Artificial Sequence
  Description of Artificial Sequence: Synthetic primer
cccacacatgtgcccagagtagggggcatggaggagatgg

SEQ ID NO: 30750 - DNA, 40 bp, Artificial Sequence
  Description of Artificial Sequence: Synthetic primer
gtgtctcttgtgagatcagcgtgcagcttccctggccttg

SEQ ID NO: 30751 - DNA, 40 bp, Artificial Sequence
  Description of Artificial Sequence: Synthetic primer
atctgccccacacccaaatttgcactttaatttgaccatc

SEQ ID NO: 30752 - DNA, 40 bp, Artificial Sequence
  Description of Artificial Sequence: Synthetic primer
ccgtcaagttcaagccagttaccctcatctacttgaacag

SEQ ID NO: 30753 - DNA, 40 bp, Artificial Sequence
  Description of Artificial Sequence: Synthetic primer
tgcctggtatctgcacagaaggtgctagagggatcagagc

SEQ ID NO: 30754 - DNA, 40 bp, Artificial Sequence
  Description of Artificial Sequence: Synthetic primer
ttcactaatctgaacatttagttctcctttctgaaaactc

SEQ ID NO: 30755 - DNA, 40 bp, Artificial Sequence
  Description of Artificial Sequence: Synthetic primer
taaaggatttacaaattcatcaacccctgaaaactaaagc

SEQ ID NO: 30756 - DNA, 40 bp, Artificial Sequence
  Description of Artificial Sequence: Synthetic primer
gatgccagagccccatccttggggatcggccccagagagc

SEQ ID NO: 30757 - DNA, 40 bp, Artificial Sequence
  Description of Artificial Sequence: Synthetic primer
ctgttgtagctgttggctgttgtgtgtggtgtagtgtgtc

SEQ ID NO: 30758 - DNA, 40 bp, Artificial Sequence
  Description of Artificial Sequence: Synthetic primer
ggctgtcagtgttggagagttatcacagtacctgctatgc

SEQ ID NO: 30759 - DNA, 40 bp, Artificial Sequence
  Description of Artificial Sequence: Synthetic primer
gctaccaagtcagacaccaaggtttatgccaccaggtaac

SEQ ID NO: 30760 - DNA, 40 bp, Artificial Sequence
  Description of Artificial Sequence: Synthetic primer
gcccggggcaggcctgacgggcagctgaggattgcagagc

SEQ ID NO: 30761 - DNA, 40 bp, Artificial Sequence
  Description of Artificial Sequence: Synthetic primer
aatgtgtttggattggaccttaaagacgagaaaacattac

SEQ ID NO: 30762 - DNA, 40 bp, Artificial Sequence
  Description of Artificial Sequence: Synthetic primer
gtttccctctttgaactctgtatcgacttccttgctgttc

SEQ ID NO: 30763 - DNA, 40 bp, Artificial Sequence
  Description of Artificial Sequence: Synthetic primer
ttctttcgaatattctcaactacagtttttgttattgttg

SEQ ID NO: 30764 - DNA, 40 bp, Artificial Sequence
  Description of Artificial Sequence: Synthetic primer
gcattgggttcctctgctgccacttcatcttcatcaatac

SEQ ID NO: 30765 - DNA, 40 bp, Artificial Sequence
  Description of Artificial Sequence: Synthetic primer
cctaaaaaataccagttttgaatgagtttttgtggttttg

SEQ ID NO: 30766 - DNA, 40 bp, Artificial Sequence
  Description of Artificial Sequence: Synthetic primer
ttgtttgatgggtcccaggaaacactaataaaaaccacag

SEQ ID NO: 30767 - DNA, 40 bp, Artificial Sequence
  Description of Artificial Sequence: Synthetic primer
cgtatcctgaacaaggctacgataggccttatgaggattc

SEQ ID NO: 30768 - DNA, 40 bp, Artificial Sequence
  Description of Artificial Sequence: Synthetic primer
tctccccaccttcttgggactgctgtgaacatgcctcctc

SEQ ID NO: 30769 - DNA, 40 bp, Artificial Sequence
  Description of Artificial Sequence: Synthetic primer
cctgttggtagttttatcaaacatcagcattgcatcttcc

SEQ ID NO: 30770 - DNA, 40 bp, Artificial Sequence
  Description of Artificial Sequence: Synthetic primer
tggcgttcaacaagcactatcagatcaatgacatctacag

SEQ ID NO: 30771 - DNA, 40 bp, Artificial Sequence
  Description of Artificial Sequence: Synthetic primer
aggcctgcaggtgacttttgggaagatgtcaagaaaactg

SEQ ID NO: 30772 - DNA, 40 bp, Artificial Sequence
  Description of Artificial Sequence: Synthetic primer
gctgtggtgtgagagagtagatcctcttttaactttactg

SEQ ID NO: 30773 - DNA, 40 bp, Artificial Sequence
  Description of Artificial Sequence: Synthetic primer
taggccttcaaaaccagagccttctttcaagctgttaatc

SEQ ID NO: 30774 - DNA, 40 bp, Artificial Sequence
  Description of Artificial Sequence: Synthetic primer
gttaggctgacccaaactgtgctaatggaaaagatcagtc

SEQ ID NO: 30775 - DNA, 40 bp, Artificial Sequence
  Description of Artificial Sequence: Synthetic primer
agcagcagccctgggtgtttggacatctcaaagtcattgc

SEQ ID NO: 30776 - DNA, 40 bp, Artificial Sequence
  Description of Artificial Sequence: Synthetic primer
acttggggactggtcagggtataggttggggtagggagtg

SEQ ID NO: 30777 - DNA, 40 bp, Artificial Sequence
  Description of Artificial Sequence: Synthetic primer
catgggcgctatgtgccccctagcagtaccgatcgtagcc

SEQ ID NO: 30778 - DNA, 40 bp, Artificial Sequence
  Description of Artificial Sequence: Synthetic primer
gcctgtgacttccaccaggactgtgcccagggagaagatg

SEQ ID NO: 30779 - DNA, 40 bp, Artificial Sequence
  Description of Artificial Sequence: Synthetic primer
tctttgttttgggtacactccagttgatgagtaagacaat

SEQ ID NO: 30780 - DNA, 40 bp, Artificial Sequence
  Description of Artificial Sequence: Synthetic primer
aatcgaagacttcaggctcaactgagtcatgtttccagag

SEQ ID NO: 30781 - DNA, 40 bp, Artificial Sequence
  Description of Artificial Sequence: Synthetic primer
tgttcagttctaagttttgtgagtgtttcatttaactgtg

SEQ ID NO: 30782 - DNA, 40 bp, Artificial Sequence
  Description of Artificial Sequence: Synthetic primer
ttcagccatagccaccagcacggtttcggcctcctcaacg

SEQ ID NO: 30783 - DNA, 40 bp, Artificial Sequence
  Description of Artificial Sequence: Synthetic primer
gtccctgaacagcagagacagatcacattgaaaacaactc

SEQ ID NO: 30784 - DNA, 40 bp, Artificial Sequence
  Description of Artificial Sequence: Synthetic primer
tggtcacaggtggcttagaagtgtgtgttatggttttacg

SEQ ID NO: 30785 - DNA, 40 bp, Artificial Sequence
  Description of Artificial Sequence: Synthetic primer
ctggaacctgttgcccccaagaaggtgtgaaaaccacagc

SEQ ID NO: 30786 - DNA, 40 bp, Artificial Sequence
  Description of Artificial Sequence: Synthetic primer
ctccagaagctcttctacagacttgatctttccatctttc

SEQ ID NO: 30787 - DNA, 40 bp, Artificial Sequence
  Description of Artificial Sequence: Synthetic primer
cggcattgccttgcttgaaggaggaaatacacaaacacag

SEQ ID NO: 30788 - DNA, 40 bp, Artificial Sequence
  Description of Artificial Sequence: Synthetic primer
gtacaattatgtctcttgagcatcaatcttgttactgctg

SEQ ID NO: 30789 - DNA, 40 bp, Artificial Sequence
  Description of Artificial Sequence: Synthetic primer
ggctgagaggtggtggcagcggctttcaaaggcttcatgg

SEQ ID NO: 30790 - DNA, 40 bp, Artificial Sequence
  Description of Artificial Sequence: Synthetic primer
actgtaaaagtggaccagtatttgtaataatcgagaatgc

SEQ ID NO: 30791 - DNA, 40 bp, Artificial Sequence
  Description of Artificial Sequence: Synthetic primer
caggcacttgggtgatgctcagggctggatcctctttcac

SEQ ID NO: 30792 - DNA, 40 bp, Artificial Sequence
  Description of Artificial Sequence: Synthetic primer
agttacttggattatactcatttcacttagaatgtttcag

SEQ ID NO: 30793 - DNA, 40 bp, Artificial Sequence
  Description of Artificial Sequence: Synthetic primer
agctgtggaggcaacggagtttttccgcgctttttctttc

SEQ ID NO: 30794 - DNA, 40 bp, Artificial Sequence
  Description of Artificial Sequence: Synthetic primer
gagggcccacgaccccctggccgatgtcagcaatgacctg

SEQ ID NO: 30795 - DNA, 40 bp, Artificial Sequence
  Description of Artificial Sequence: Synthetic primer
gctagctccaggacagaaaggagctgaattttctaacttg

SEQ ID NO: 30796 - DNA, 40 bp, Artificial Sequence
  Description of Artificial Sequence: Synthetic primer
agggcgagagactgagtttcatgcttcttcaccttacagc

SEQ ID NO: 30797 - DNA, 40 bp, Artificial Sequence
  Description of Artificial Sequence: Synthetic primer
tcctccattgtggaacccaaggagccagccccagaaacag

SEQ ID NO: 30798 - DNA, 40 bp, Artificial Sequence
  Description of Artificial Sequence: Synthetic primer
caccccatacagctgcaccagtttgggatgagagagtttc

SEQ ID NO: 30799 - DNA, 40 bp, Artificial Sequence
  Description of Artificial Sequence: Synthetic primer
tctccagatcttgagcaatcttcagatattccaggacagc

SEQ ID NO: 30800 - DNA, 40 bp, Artificial Sequence
  Description of Artificial Sequence: Synthetic primer
ggggcctgggcaggcagaatggggctgcctctgtcactcc

SEQ ID NO: 30801 - DNA, 40 bp, Artificial Sequence
  Description of Artificial Sequence: Synthetic primer
agtccatgaaatggaaaaggagcacttaaataaggttcag

SEQ ID NO: 30802 - DNA, 40 bp, Artificial Sequence
  Description of Artificial Sequence: Synthetic primer
aagcggcaggcctccgaggacgccctgacggtcatcaacc

SEQ ID NO: 30803 - DNA, 40 bp, Artificial Sequence
  Description of Artificial Sequence: Synthetic primer
cttgtacaagtctgtcaggaagaggctgtggaccagtgtg

SEQ ID NO: 30804 - DNA, 40 bp, Artificial Sequence
  Description of Artificial Sequence: Synthetic primer
gtgttcatcaatttagctgttgctctcttctacccatttg

SEQ ID NO: 30805 - DNA, 40 bp, Artificial Sequence
  Description of Artificial Sequence: Synthetic primer
cctcgctctgggcacgcttccgttcctgctcaagttccag

SEQ ID NO: 30806 - DNA, 40 bp, Artificial Sequence
  Description of Artificial Sequence: Synthetic primer
cactaaaggtttctccacctggctgaaactcaataagaag

SEQ ID NO: 30807 - DNA, 40 bp, Artificial Sequence
  Description of Artificial Sequence: Synthetic primer
gtataaatgtacataaagacaaactagtaagcatgacctg

SEQ ID NO: 30808 - DNA, 40 bp, Artificial Sequence
  Description of Artificial Sequence: Synthetic primer
atgagccttcattttacttttcatttcaatgttaaaaatc

SEQ ID NO: 30809 - DNA, 40 bp, Artificial Sequence
  Description of Artificial Sequence: Synthetic primer
aaaaggagatgaagaaggtgttcctgctgttgttattgac

SEQ ID NO: 30810 - DNA, 40 bp, Artificial Sequence
  Description of Artificial Sequence: Synthetic primer
ttaaaaaactggagaatgacaccatttctaagcaacttac

SEQ ID NO: 30811 - DNA, 40 bp, Artificial Sequence
  Description of Artificial Sequence: Synthetic primer
gcctcggccccagtggccgccttttcgacctcagctacgc

SEQ ID NO: 30812 - DNA, 40 bp, Artificial Sequence
  Description of Artificial Sequence: Synthetic primer
aggggacatcgtgtccctgtacgcggagggctcggtcaac

SEQ ID NO: 30813 - DNA, 40 bp, Artificial Sequence
  Description of Artificial Sequence: Synthetic primer
tttttaaaggtagagattaaactgtatagacagcataggg

SEQ ID NO: 30814 - DNA, 40 bp, Artificial Sequence
  Description of Artificial Sequence: Synthetic primer
cacctgcagaaaaggctttgccaaaatccaagaggaaacg

SEQ ID NO: 30815 - DNA, 40 bp, Artificial Sequence
  Description of Artificial Sequence: Synthetic primer
cttggagatgcttaacttagactcttggaaaccaactcac

SEQ ID NO: 30816 - DNA, 40 bp, Artificial Sequence
  Description of Artificial Sequence: Synthetic primer
gggggagagagcccgagggacctacaggcttgtcatcagg

SEQ ID NO: 30817 - DNA, 40 bp, Artificial Sequence
  Description of Artificial Sequence: Synthetic primer
ctcctcgatgccaatggtgttatctttgaggttctgacac

SEQ ID NO: 30818 - DNA, 40 bp, Artificial Sequence
  Description of Artificial Sequence: Synthetic primer
ttgtctacgccgtggaaaaactctccaaggaaaacaacag

SEQ ID NO: 30819 - DNA, 40 bp, Artificial Sequence
  Description of Artificial Sequence: Synthetic primer
tccatcaatattaacagagatggctttggactgaatcaag

SEQ ID NO: 30820 - DNA, 40 bp, Artificial Sequence
  Description of Artificial Sequence: Synthetic primer
gcaggctccagagccagctgtgggactagaatcggctcca

SEQ ID NO: 30821 - DNA, 40 bp, Artificial Sequence
  Description of Artificial Sequence: Synthetic primer
ctctttaagactgttttaaaagaaatcaatttagggaacc

SEQ ID NO: 30822 - DNA, 40 bp, Artificial Sequence
  Description of Artificial Sequence: Synthetic primer
gctcaagaaactgtgttgtaccactgacaataataagcag

SEQ ID NO: 30823 - DNA, 40 bp, Artificial Sequence
  Description of Artificial Sequence: Synthetic primer
gtacgtgtcaatcaaggcatcaagaaacttaacaataagc

SEQ ID NO: 30824 - DNA, 40 bp, Artificial Sequence
  Description of Artificial Sequence: Synthetic primer
aggatccctgaaggattatggcagctatccccgtgtcaag

SEQ ID NO: 30825 - DNA, 40 bp, Artificial Sequence
  Description of Artificial Sequence: Synthetic primer
ccgcgggtagaagatgctgatgtgcacgatgtccaggaag

SEQ ID NO: 30826 - DNA, 40 bp, Artificial Sequence
  Description of Artificial Sequence: Synthetic primer
aggaatctatagtttaagctccagacatacaaacataagg

SEQ ID NO: 30827 - DNA, 40 bp, Artificial Sequence
  Description of Artificial Sequence: Synthetic primer
gtcccattagttgctgtggattatcaagttttgaaggaac

SEQ ID NO: 30828 - DNA, 40 bp, Artificial Sequence
  Description of Artificial Sequence: Synthetic primer
tcctgggcccagaagagaggaattgaaggaacatatgcag

SEQ ID NO: 30829 - DNA, 40 bp, Artificial Sequence
  Description of Artificial Sequence: Synthetic primer
tcaagccagcagatggacgacctgtttgacattctcattc

SEQ ID NO: 30830 - DNA, 40 bp, Artificial Sequence
  Description of Artificial Sequence: Synthetic primer
accctgcctaccttaggaataaatgctacttaaggaaaaa

SEQ ID NO: 30831 - DNA, 40 bp, Artificial Sequence
  Description of Artificial Sequence: Synthetic primer
aaatcctaattggatatttagaatatgtcaagaaattagg

SEQ ID NO: 30832 - DNA, 40 bp, Artificial Sequence
  Description of Artificial Sequence: Synthetic primer
gatttgtttggaatcccgttgatatgtacagtagtgcttc

SEQ ID NO: 30833 - DNA, 40 bp, Artificial Sequence
  Description of Artificial Sequence: Synthetic primer
ctttcaaaagcttatgataggcaaatgggcgtttttgctg

SEQ ID NO: 30834 - DNA, 40 bp, Artificial Sequence
  Description of Artificial Sequence: Synthetic primer
actcgcccgggcgggagccgcaatgcgagctagactggag

SEQ ID NO: 30835 - DNA, 40 bp, Artificial Sequence
  Description of Artificial Sequence: Synthetic primer
tatgtcacacagggaggaacacaccatcactccgaggttc

SEQ ID NO: 30836 - DNA, 40 bp, Artificial Sequence
  Description of Artificial Sequence: Synthetic primer
agtcggtgctgcacttgacgcagtgtgttttaggtgtttg

SEQ ID NO: 30837 - DNA, 40 bp, Artificial Sequence
  Description of Artificial Sequence: Synthetic primer
accgcgccgtctccacctctgcttaggtgctctctgtgac

SEQ ID NO: 30838 - DNA, 40 bp, Artificial Sequence
  Description of Artificial Sequence: Synthetic primer
tcattttattttctttctcagtgatttggatcaatagtag

SEQ ID NO: 30839 - DNA, 40 bp, Artificial Sequence
  Description of Artificial Sequence: Synthetic primer
ctcttcttccgagacaggtgcagctgggcattggtgagag

SEQ ID NO: 30840 - DNA, 40 bp, Artificial Sequence
  Description of Artificial Sequence: Synthetic primer
cgcctccttttcgcccagcactagcgccttaggccagctc

SEQ ID NO: 30841 - DNA, 40 bp, Artificial Sequence
  Description of Artificial Sequence: Synthetic primer
gcttgtgaacataataattaaaatcaaattcataagctac

SEQ ID NO: 30842 - DNA, 40 bp, Artificial Sequence
  Description of Artificial Sequence: Synthetic primer
ctacgctgaaacctttgcccttgttcttctcaaactcctc

SEQ ID NO: 30843 - DNA, 40 bp, Artificial Sequence
  Description of Artificial Sequence: Synthetic primer
aaaagtaggagggctgccaaacactggagcagcaccgaag

SEQ ID NO: 30844 - DNA, 40 bp, Artificial Sequence
  Description of Artificial Sequence: Synthetic primer
gctgtcagagcccggggacggcgaggccctcatgtaccac

SEQ ID NO: 30845 - DNA, 40 bp, Artificial Sequence
  Description of Artificial Sequence: Synthetic primer
ggggtggtttaggcccttcatgatgcggacttctcggaac

SEQ ID NO: 30846 - DNA, 40 bp, Artificial Sequence
  Description of Artificial Sequence: Synthetic primer
cgccctggcgcgggcgattctcagccagtgcatgtatttc

SEQ ID NO: 30847 - DNA, 40 bp, Artificial Sequence
  Description of Artificial Sequence: Synthetic primer
ctccaatcggcgcatggcagtcaatgcagatgctctgttc

SEQ ID NO: 30848 - DNA, 40 bp, Artificial Sequence
  Description of Artificial Sequence: Synthetic primer
ggcactaacaatatatttctcttccatctctctctgactc

SEQ ID NO: 30849 - DNA, 40 bp, Artificial Sequence
  Description of Artificial Sequence: Synthetic primer
gctggctggcagtggtctgatggaacgccgctcaactatc

SEQ ID NO: 30850 - DNA, 40 bp, Artificial Sequence
  Description of Artificial Sequence: Synthetic primer
cttgggctcgtgctgcgacagctgctccatgctgctatac

SEQ ID NO: 30851 - DNA, 40 bp, Artificial Sequence
  Description of Artificial Sequence: Synthetic primer
gaaaaatagataaatatatttttttcaggaaatagtgtgg

SEQ ID NO: 30852 - DNA, 40 bp, Artificial Sequence
  Description of Artificial Sequence: Synthetic primer
ccctggccacgctgcagtacgcactggcctgtgtcaagca

SEQ ID NO: 30853 - DNA, 40 bp, Artificial Sequence
  Description of Artificial Sequence: Synthetic primer
tgccctccctgtagtggaagaaggggaggttctctcacac

SEQ ID NO: 30854 - DNA, 40 bp, Artificial Sequence
  Description of Artificial Sequence: Synthetic primer
caacctgccagccacccagtggcctccaaccagagcaaag

SEQ ID NO: 30855 - DNA, 40 bp, Artificial Sequence
  Description of Artificial Sequence: Synthetic primer
agagtccaaccagacttcgtccatccacactgaggagctg

SEQ ID NO: 30856 - DNA, 40 bp, Artificial Sequence
  Description of Artificial Sequence: Synthetic primer
tcctgagacagtctctgagctggcatcaaacacctacttc

SEQ ID NO: 30857 - DNA, 40 bp, Artificial Sequence
  Description of Artificial Sequence: Synthetic primer
tactgtaataaagatgattgtgaaataaaactggctttgg

SEQ ID NO: 30858 - DNA, 40 bp, Artificial Sequence
  Description of Artificial Sequence: Synthetic primer
gatgaagaactgacttcctcacagagggatttagctgtaa

SEQ ID NO: 30859 - DNA, 40 bp, Artificial Sequence
  Description of Artificial Sequence: Synthetic primer
aagaaagtgtgaagaagaaattgctaaattatacaaacag

SEQ ID NO: 30860 - DNA, 40 bp, Artificial Sequence
  Description of Artificial Sequence: Synthetic primer
tctgtgaatgcaaggagacagccagcaagaccctcagcag

SEQ ID NO: 30861 - DNA, 40 bp, Artificial Sequence
  Description of Artificial Sequence: Synthetic primer
ggtgtgtgacaatgacaccgtgcctagcgtcagttccatc

SEQ ID NO: 30862 - DNA, 40 bp, Artificial Sequence
  Description of Artificial Sequence: Synthetic primer
ggaacactctgactgtcttagtctgcccaattctatgtgc

SEQ ID NO: 30863 - DNA, 40 bp, Artificial Sequence
  Description of Artificial Sequence: Synthetic primer
ctcctgcacatttttacagttctccagtccttctctttcg

SEQ ID NO: 30864 - DNA, 40 bp, Artificial Sequence
  Description of Artificial Sequence: Synthetic primer
tttgctcttcagaatgctacaggggatgggaaatttatcg

SEQ ID NO: 30865 - DNA, 40 bp, Artificial Sequence
  Description of Artificial Sequence: Synthetic primer
tagatgagtcaaccaggcataatgtactctacagaataag

SEQ ID NO: 30866 - DNA, 40 bp, Artificial Sequence
  Description of Artificial Sequence: Synthetic primer
gggaatagatttagtgagttgagacacttatctcataggg

SEQ ID NO: 30867 - DNA, 40 bp, Artificial Sequence
  Description of Artificial Sequence: Synthetic primer
tctctagaacgtggttgtcatctgttattcctaagacttc

SEQ ID NO: 30868 - DNA, 40 bp, Artificial Sequence
  Description of Artificial Sequence: Synthetic primer
gatcaataaacttgatcgcattatggccagcactattaag

SEQ ID NO: 30869 - DNA, 40 bp, Artificial Sequence
  Description of Artificial Sequence: Synthetic primer
agggcaactggcaaattaaccatttgggagaaggctggag

SEQ ID NO: 30870 - DNA, 40 bp, Artificial Sequence
  Description of Artificial Sequence: Synthetic primer
tggatctgcatgcatttggatctgtgtgccttgtttctcc

SEQ ID NO: 30871 - DNA, 40 bp, Artificial Sequence
  Description of Artificial Sequence: Synthetic primer
cctgtgtcagcgtgctgagtaccagacggcgtgtgagcag

SEQ ID NO: 30872 - DNA, 40 bp, Artificial Sequence
  Description of Artificial Sequence: Synthetic primer
gctggcgaggcagtggttgcaggagatggtgctgcaaatg

SEQ ID NO: 30873 - DNA, 40 bp, Artificial Sequence
  Description of Artificial Sequence: Synthetic primer
cccatctggcttgttaatgagtaggtcatgggcctgttgc

SEQ ID NO: 30874 - DNA, 40 bp, Artificial Sequence
  Description of Artificial Sequence: Synthetic primer
agagtaggtgaagatacgcctttcctgggcatacagaacc

SEQ ID NO: 30875 - DNA, 40 bp, Artificial Sequence
  Description of Artificial Sequence: Synthetic primer
gaaatgctgtcatgcttgaatagacttaaggccagttttc

SEQ ID NO: 30876 - DNA, 40 bp, Artificial Sequence
  Description of Artificial Sequence: Synthetic primer
ccctttcacgatcgccaggaacgcagaccaggaggagctg

SEQ ID NO: 30877 - DNA, 40 bp, Artificial Sequence
  Description of Artificial Sequence: Synthetic primer
tctttgaagaatcatttttgttggcagtttctgactcttc

SEQ ID NO: 30878 - DNA, 40 bp, Artificial Sequence
  Description of Artificial Sequence: Synthetic primer
tcctcccgccctgcgagttgagtagagggcagcgacttgg

SEQ ID NO: 30879 - DNA, 40 bp, Artificial Sequence
  Description of Artificial Sequence: Synthetic primer
caaagtccttgcagaagtaatgttcctcccgctgcttgtc

SEQ ID NO: 30880 - DNA, 40 bp, Artificial Sequence
  Description of Artificial Sequence: Synthetic primer
acaccgatgctgtactcttcctggggtttctgcatagcac

SEQ ID NO: 30881 - DNA, 40 bp, Artificial Sequence
  Description of Artificial Sequence: Synthetic primer
cccatacagtggaggcaccttctcctgagactatctgtga

SEQ ID NO: 30882 - DNA, 40 bp, Artificial Sequence
  Description of Artificial Sequence: Synthetic primer
cagtttttgtcacacttatgattgaacattgcacatcctt

SEQ ID NO: 30883 - DNA, 40 bp, Artificial Sequence
  Description of Artificial Sequence: Synthetic primer
gtttccttaatggccaggatcccccttatctcaggtgcag

SEQ ID NO: 30884 - DNA, 40 bp, Artificial Sequence
  Description of Artificial Sequence: Synthetic primer
gactgacctcagccgtacactgcggcctgacatgctgttc

SEQ ID NO: 30885 - DNA, 40 bp, Artificial Sequence
  Description of Artificial Sequence: Synthetic primer
tctgatgtatttgcacaattgcagtggtgtgtcaaacaag

SEQ ID NO: 30886 - DNA, 40 bp, Artificial Sequence
  Description of Artificial Sequence: Synthetic primer
taaggaacccgaagtcgtcttcatcggggactccttggtc

SEQ ID NO: 30887 - DNA, 40 bp, Artificial Sequence
  Description of Artificial Sequence: Synthetic primer
ggagctgtctgctgtaatacctaagtcaacagtacagctc

SEQ ID NO: 30888 - DNA, 40 bp, Artificial Sequence
  Description of Artificial Sequence: Synthetic primer
agctcctccaggacttccagaagcagggcgtcgccctggc

SEQ ID NO: 30889 - DNA, 40 bp, Artificial Sequence
  Description of Artificial Sequence: Synthetic primer
atcaagttggagcctgtgcccctcaaggggacctctctgg

SEQ ID NO: 30890 - DNA, 40 bp, Artificial Sequence
  Description of Artificial Sequence: Synthetic primer
ggagtccccgatgaagacgacttcgggttccttatctttg

SEQ ID NO: 30891 - DNA, 40 bp, Artificial Sequence
  Description of Artificial Sequence: Synthetic primer
tgcctttcccattattccaaatgcttataatgttagattc

SEQ ID NO: 30892 - DNA, 40 bp, Artificial Sequence
  Description of Artificial Sequence: Synthetic primer
aaggcaccatggtaggcatctggagctctggggtaggaag

SEQ ID NO: 30893 - DNA, 40 bp, Artificial Sequence
  Description of Artificial Sequence: Synthetic primer
gacacctcgtgtttatcagaggagatggcggaagagatag

SEQ ID NO: 30894 - DNA, 40 bp, Artificial Sequence
  Description of Artificial Sequence: Synthetic primer
aacaagtgtacagttccatttttttaataaacaaacaaac

SEQ ID NO: 30895 - DNA, 40 bp, Artificial Sequence
  Description of Artificial Sequence: Synthetic primer
accacttcatacatgttttatcaatcagagccccaaaata

SEQ ID NO: 30896 - DNA, 40 bp, Artificial Sequence
  Description of Artificial Sequence: Synthetic primer
accatcaaaatgtttaattttggcttcagaagtcttcatc

SEQ ID NO: 30897 - DNA, 40 bp, Artificial Sequence
  Description of Artificial Sequence: Synthetic primer
tcaaacctgcaggtctcagggccccgggctcctcctgggc

SEQ ID NO: 30898 - DNA, 40 bp, Artificial Sequence
  Description of Artificial Sequence: Synthetic primer
cgtctttcaacttcacagggtcgatttcacagggtttgtg

SEQ ID NO: 30899 - DNA, 40 bp, Artificial Sequence
  Description of Artificial Sequence: Synthetic primer
caacagtgtggatctctccgaagtggagtgggaagaccag

SEQ ID NO: 30900 - DNA, 40 bp, Artificial Sequence
  Description of Artificial Sequence: Synthetic primer
agcaggttattctgagctggagtcactggagatggggaag

SEQ ID NO: 30901 - DNA, 40 bp, Artificial Sequence
  Description of Artificial Sequence: Synthetic primer
gaggtgtcggagtactgtagccacatgattgggagtggac

SEQ ID NO: 30902 - DNA, 40 bp, Artificial Sequence
  Description of Artificial Sequence: Synthetic primer
cttctagttcaaccatcaatctaatggtgagcacagaacc

SEQ ID NO: 30903 - DNA, 40 bp, Artificial Sequence
  Description of Artificial Sequence: Synthetic primer
gctctcgctcgctcctgcctgccgggacagcgccttctgc

SEQ ID NO: 30904 - DNA, 40 bp, Artificial Sequence
  Description of Artificial Sequence: Synthetic primer
tcagatctttggaaagaggatttagcggcatttgttgaag

SEQ ID NO: 30905 - DNA, 40 bp, Artificial Sequence
  Description of Artificial Sequence: Synthetic primer
atggttgaactagaagctgaccttgctggctgtggaggtg

SEQ ID NO: 30906 - DNA, 40 bp, Artificial Sequence
  Description of Artificial Sequence: Synthetic primer
tggcagggaaggacaggccgctggccggctgcaggaccag

SEQ ID NO: 30907 - DNA, 40 bp, Artificial Sequence
  Description of Artificial Sequence: Synthetic primer
ccaaaataacccctccggggggtgagaggcaattataacc

SEQ ID NO: 30908 - DNA, 40 bp, Artificial Sequence
  Description of Artificial Sequence: Synthetic primer
ttaaacacacacacatatatatatgaaaacatcacatata

SEQ ID NO: 30909 - DNA, 40 bp, Artificial Sequence
  Description of Artificial Sequence: Synthetic primer
atcaagaagcacgtgcctgaagacttctggccgccgcagc

SEQ ID NO: 30910 - DNA, 40 bp, Artificial Sequence
  Description of Artificial Sequence: Synthetic primer
gacccttgaaggcagcgatgccgaggagagcctggataag

SEQ ID NO: 30911 - DNA, 40 bp, Artificial Sequence
  Description of Artificial Sequence: Synthetic primer
gtctgtggctttgtttcttttccctcgtccctcttcactc

SEQ ID NO: 30912 - DNA, 40 bp, Artificial Sequence
  Description of Artificial Sequence: Synthetic primer
catactgtctgtgctgatggcttggcttaagattttgatg

SEQ ID NO: 30913 - DNA, 40 bp, Artificial Sequence
  Description of Artificial Sequence: Synthetic primer
cggcgcctgagcgcgctgcagtcacccgggagccgggtcc

SEQ ID NO: 30914 - DNA, 40 bp, Artificial Sequence
  Description of Artificial Sequence: Synthetic primer
agagcaataggattcatgtttggccctggacatggatagc

SEQ ID NO: 30915 - DNA, 40 bp, Artificial Sequence
  Description of Artificial Sequence: Synthetic primer
cagcaccaaaagcttaggaatcccctcggcagcccggtag

SEQ ID NO: 30916 - DNA, 40 bp, Artificial Sequence
  Description of Artificial Sequence: Synthetic primer
gaatctggccagcagccgcgccatcttcatcagccggaag

SEQ ID NO: 30917 - DNA, 40 bp, Artificial Sequence
  Description of Artificial Sequence: Synthetic primer
atgaaactctcctatgtacatgtagtttttcttaaaaaaa

SEQ ID NO: 30918 - DNA, 40 bp, Artificial Sequence
  Description of Artificial Sequence: Synthetic primer
tgtggccacagcactttgtcaggcacggcaaatggcaccc

SEQ ID NO: 30919 - DNA, 40 bp, Artificial Sequence
  Description of Artificial Sequence: Synthetic primer
atgacctgaacaaaccccctgaattttcctttgagaaagc

SEQ ID NO: 30920 - DNA, 40 bp, Artificial Sequence
  Description of Artificial Sequence: Synthetic primer
atatcgtatctattcttaatacctcccctccggacctgac

SEQ ID NO: 30921 - DNA, 40 bp, Artificial Sequence
  Description of Artificial Sequence: Synthetic primer
gggccaggtgtgtgaagtcttgaagaagaaagtggacatc

SEQ ID NO: 30922 - DNA, 40 bp, Artificial Sequence
  Description of Artificial Sequence: Synthetic primer
tcggacagaggaatatgggccccagaaacatgcagcagtc

SEQ ID NO: 30923 - DNA, 40 bp, Artificial Sequence
  Description of Artificial Sequence: Synthetic primer
atttacagacaggtccctaggctggtggacagctgctgtc

SEQ ID NO: 30924 - DNA, 40 bp, Artificial Sequence
  Description of Artificial Sequence: Synthetic primer
tggtgtccgtggggtggaaatccgcagcaaacacagcttc

SEQ ID NO: 30925 - DNA, 40 bp, Artificial Sequence
  Description of Artificial Sequence: Synthetic primer
gatgatagaaatcaaacagctaatttgaccaaccaaggaa

SEQ ID NO: 30926 - DNA, 40 bp, Artificial Sequence
  Description of Artificial Sequence: Synthetic primer
tgaaaatgactgcatatttgacaaatttgaatgttgttgg

SEQ ID NO: 30927 - DNA, 40 bp, Artificial Sequence
  Description of Artificial Sequence: Synthetic primer
gagctgagtcatagtgccaaatctgatgccggtttagtgg

SEQ ID NO: 30928 - DNA, 40 bp, Artificial Sequence
  Description of Artificial Sequence: Synthetic primer
caatgacagaacctggtatcaggtcacgaattccactctc

SEQ ID NO: 30929 - DNA, 40 bp, Artificial Sequence
  Description of Artificial Sequence: Synthetic primer
ccagaccccacagagacatgatctgggacttggaggttgc

SEQ ID NO: 30930 - DNA, 40 bp, Artificial Sequence
  Description of Artificial Sequence: Synthetic primer
gaagagtagctaggcagatgcagagatggagacatgagac

SEQ ID NO: 30931 - DNA, 40 bp, Artificial Sequence
  Description of Artificial Sequence: Synthetic primer
taacacttccatcacaccgtcaaaccattgccagaaagtg

SEQ ID NO: 30932 - DNA, 40 bp, Artificial Sequence
  Description of Artificial Sequence: Synthetic primer
ttcactcccttttctctaggatttgaattcaggccaggcc

SEQ ID NO: 30933 - DNA, 40 bp, Artificial Sequence
  Description of Artificial Sequence: Synthetic primer
gggagggattccccctccaacacctcccagtcagaacagc

SEQ ID NO: 30934 - DNA, 40 bp, Artificial Sequence
  Description of Artificial Sequence: Synthetic primer
caaggctgaggatcactttgtagagaaactgatactgctc

SEQ ID NO: 30935 - DNA, 40 bp, Artificial Sequence
  Description of Artificial Sequence: Synthetic primer
acctgccgcgtcccacgtgccagcagcactgacagggagc

SEQ ID NO: 30936 - DNA, 40 bp, Artificial Sequence
  Description of Artificial Sequence: Synthetic primer
aaagatccaggtaacgagttgtgaagaccagtgcaaacag

SEQ ID NO: 30937 - DNA, 40 bp, Artificial Sequence
  Description of Artificial Sequence: Synthetic primer
tcctgcttggcaagctcatggacctcttccctctgtctga

SEQ ID NO: 30938 - DNA, 40 bp, Artificial Sequence
  Description of Artificial Sequence: Synthetic primer
ggtcggccctcccagcagggtcagctggcggacagcgttg

SEQ ID NO: 30939 - DNA, 40 bp, Artificial Sequence
  Description of Artificial Sequence: Synthetic primer
catgttatgttttattagcaatgaattgtcacaatattcc

SEQ ID NO: 30940 - DNA, 40 bp, Artificial Sequence
  Description of Artificial Sequence: Synthetic primer
ctcctacgtcgaacccacaccattaccattgagtcagaag

SEQ ID NO: 30941 - DNA, 40 bp, Artificial Sequence
  Description of Artificial Sequence: Synthetic primer
cacattattctacctttgcctacttcccaactgaggtaac

SEQ ID NO: 30942 - DNA, 40 bp, Artificial Sequence
  Description of Artificial Sequence: Synthetic primer
gggaacatcctccactcagggttcgcctttccacctacgg

SEQ ID NO: 30943 - DNA, 40 bp, Artificial Sequence
  Description of Artificial Sequence: Synthetic primer
ggtgatactcctgctcgccaggagacagaccaacaacagc

SEQ ID NO: 30944 - DNA, 40 bp, Artificial Sequence
  Description of Artificial Sequence: Synthetic primer
gaggtcgtccgggtgctgcaggcggttgtggactctctcc

SEQ ID NO: 30945 - DNA, 40 bp, Artificial Sequence
  Description of Artificial Sequence: Synthetic primer
atggtttcatcgtgcagacggcagagattgcggagattgc

SEQ ID NO: 30946 - DNA, 40 bp, Artificial Sequence
  Description of Artificial Sequence: Synthetic primer
aaaacaaatttggatcacagaaagaatgtgaaaaggtttg

SEQ ID NO: 30947 - DNA, 40 bp, Artificial Sequence
  Description of Artificial Sequence: Synthetic primer
gcccccgctggtccaccgaagccaggaggcctgcgaccgg

SEQ ID NO: 30948 - DNA, 40 bp, Artificial Sequence
  Description of Artificial Sequence: Synthetic primer
gccctcagagcacaacacagaattcctcaacgtgcctgac

SEQ ID NO: 30949 - DNA, 40 bp, Artificial Sequence
  Description of Artificial Sequence: Synthetic primer
agccggcttcgcctaccgccgccagttcgccaaattcctg

SEQ ID NO: 30950 - DNA, 40 bp, Artificial Sequence
  Description of Artificial Sequence: Synthetic primer
gttagtgcccggatccaccccgaggggcctcccctgaaat

SEQ ID NO: 30951 - DNA, 40 bp, Artificial Sequence
  Description of Artificial Sequence: Synthetic primer
tgattctcttctcaaactcagacaatgaaagatctatacc

SEQ ID NO: 30952 - DNA, 40 bp, Artificial Sequence
  Description of Artificial Sequence: Synthetic primer
tggccggggccctggtgtctctgctcatgctcctgcactc

SEQ ID NO: 30953 - DNA, 40 bp, Artificial Sequence
  Description of Artificial Sequence: Synthetic primer
gcgagtttggtccaagggctcggatcgggtttgggaaaag

SEQ ID NO: 30954 - DNA, 40 bp, Artificial Sequence
  Description of Artificial Sequence: Synthetic primer
acacggaagagtatggggtgcctgacccctgcctggccag

SEQ ID NO: 30955 - DNA, 40 bp, Artificial Sequence
  Description of Artificial Sequence: Synthetic primer
atggtagacaaccatttcgtggaagggcagcctattatcc

SEQ ID NO: 30956 - DNA, 40 bp, Artificial Sequence
  Description of Artificial Sequence: Synthetic primer
caccattatcagccactatgatgggcgccagttccccaag

SEQ ID NO: 30957 - DNA, 40 bp, Artificial Sequence
  Description of Artificial Sequence: Synthetic primer
ttgtacttctccacattcttaatgatcttcagggcaactc

SEQ ID NO: 30958 - DNA, 40 bp, Artificial Sequence
  Description of Artificial Sequence: Synthetic primer
gttagtggtgactttttgatacgaaaaaatgcattttgtg

SEQ ID NO: 30959 - DNA, 40 bp, Artificial Sequence
  Description of Artificial Sequence: Synthetic primer
cccgcccgtggcgtgcatggtggcgcacacgtcgtccaag

SEQ ID NO: 30960 - DNA, 40 bp, Artificial Sequence
  Description of Artificial Sequence: Synthetic primer
ataaagatgagtataagcagtgatgaggtcaacttcttgg

SEQ ID NO: 30961 - DNA, 40 bp, Artificial Sequence
  Description of Artificial Sequence: Synthetic primer
tgaaaataaggcttaggatatgaaatggcgttgtcacttg

SEQ ID NO: 30962 - DNA, 40 bp, Artificial Sequence
  Description of Artificial Sequence: Synthetic primer
tgtgtgtttgtggctccaagttacattttgtgtttcattg

SEQ ID NO: 30963 - DNA, 40 bp, Artificial Sequence
  Description of Artificial Sequence: Synthetic primer
ctgggggacgcttcagacactgaggctgcggatggtgagc

SEQ ID NO: 30964 - DNA, 40 bp, Artificial Sequence
  Description of Artificial Sequence: Synthetic primer
gactttaacaaaatatttttttaaaaatccactagaatag

SEQ ID NO: 30965 - DNA, 40 bp, Artificial Sequence
  Description of Artificial Sequence: Synthetic primer
tctggttgatctggaggtgtttctgggacatggcatcagc

SEQ ID NO: 30966 - DNA, 40 bp, Artificial Sequence
  Description of Artificial Sequence: Synthetic primer
tccagaagcatgtatacatacttattgtccttgaaagtac

SEQ ID NO: 30967 - DNA, 40 bp, Artificial Sequence
  Description of Artificial Sequence: Synthetic primer
tgtggaccatctatcagtttgtaattaagaaaaagtctgg

SEQ ID NO: 30968 - DNA, 40 bp, Artificial Sequence
  Description of Artificial Sequence: Synthetic primer
ggtgtggcagagggcaagtgcgctgaggtgcttggagaag

SEQ ID NO: 30969 - DNA, 40 bp, Artificial Sequence
  Description of Artificial Sequence: Synthetic primer
gccttgatgattattcattaagagttcaacagatgataca

SEQ ID NO: 30970 - DNA, 40 bp, Artificial Sequence
  Description of Artificial Sequence: Synthetic primer
aggactaaaaggactgcgactatggctattgcaattaagg

SEQ ID NO: 30971 - DNA, 40 bp, Artificial Sequence
  Description of Artificial Sequence: Synthetic primer
ctgaattcattcacagcccacatcacccagtcccgaacat

SEQ ID NO: 30972 - DNA, 40 bp, Artificial Sequence
  Description of Artificial Sequence: Synthetic primer
ctttagcttcccagtcacctttggctccctgatcccttcg

SEQ ID NO: 30973 - DNA, 40 bp, Artificial Sequence
  Description of Artificial Sequence: Synthetic primer
gtttcgcttgaccaaccatgaatttacctaccacaaaagc

SEQ ID NO: 30974 - DNA, 40 bp, Artificial Sequence
  Description of Artificial Sequence: Synthetic primer
gcctgagccgtcccctgtaagatgcgggaagtgtcagctc

SEQ ID NO: 30975 - DNA, 40 bp, Artificial Sequence
  Description of Artificial Sequence: Synthetic primer
aaactctgactcggattcagaatttggcattccaaagaag

SEQ ID NO: 30976 - DNA, 40 bp, Artificial Sequence
  Description of Artificial Sequence: Synthetic primer
ggtgtccagtccaggacactggtgcttttttatacaagag

SEQ ID NO: 30977 - DNA, 40 bp, Artificial Sequence
  Description of Artificial Sequence: Synthetic primer
ctgctgaggccgaagcctggatgagcgagcaggagctgta

SEQ ID NO: 30978 - DNA, 40 bp, Artificial Sequence
  Description of Artificial Sequence: Synthetic primer
tttgttgattatgattggctacagtgatggaatgcaggtc

SEQ ID NO: 30979 - DNA, 40 bp, Artificial Sequence
  Description of Artificial Sequence: Synthetic primer
caggccctgggtcaccaggtcactgctgcagcccccgccc

SEQ ID NO: 30980 - DNA, 40 bp, Artificial Sequence
  Description of Artificial Sequence: Synthetic primer
cgtgcacacaaggctctggctcgcttccctccctcgtttc

SEQ ID NO: 30981 - DNA, 40 bp, Artificial Sequence
  Description of Artificial Sequence: Synthetic primer
ccaccttagtgttggcgtgtcttccccctttgtagaccac

SEQ ID NO: 30982 - DNA, 40 bp, Artificial Sequence
  Description of Artificial Sequence: Synthetic primer
gggacacacaccacccgcttccagcctccagtccccagtg

SEQ ID NO: 30983 - DNA, 40 bp, Artificial Sequence
  Description of Artificial Sequence: Synthetic primer
gttttttaaactaaggtagcaaacattttgccatgtaatg

SEQ ID NO: 30984 - DNA, 40 bp, Artificial Sequence
  Description of Artificial Sequence: Synthetic primer
aacaagagaccaactttttcattccctgcccccaatttcc

SEQ ID NO: 30985 - DNA, 40 bp, Artificial Sequence
  Description of Artificial Sequence: Synthetic primer
agcgcgaatctgcggaggacgccaggcgggagggcgcatc

SEQ ID NO: 30986 - DNA, 40 bp, Artificial Sequence
  Description of Artificial Sequence: Synthetic primer
agtaccattttaatatgaaatccctgcaagttccttcgtc

SEQ ID NO: 30987 - DNA, 40 bp, Artificial Sequence
  Description of Artificial Sequence: Synthetic primer
tatagtaaggagaaagtctggttgcactttgaagagcttg

SEQ ID NO: 30988 - DNA, 40 bp, Artificial Sequence
  Description of Artificial Sequence: Synthetic primer
ataaagtttttaaacttcaaactactcttacttgtaattc

SEQ ID NO: 30989 - DNA, 40 bp, Artificial Sequence
  Description of Artificial Sequence: Synthetic primer
tgttggaagacgtggacttgctggaagacacggatttcct

SEQ ID NO: 30990 - DNA, 40 bp, Artificial Sequence
  Description of Artificial Sequence: Synthetic primer
ctttgagttttgtacctgggcaaaataaaattttaaaaag

SEQ ID NO: 30991 - DNA, 40 bp, Artificial Sequence
  Description of Artificial Sequence: Synthetic primer
taacatcttaatgaatcaatgcaatgttagttggcagcag

SEQ ID NO: 30992 - DNA, 40 bp, Artificial Sequence
  Description of Artificial Sequence: Synthetic primer
tgcgttttgttttcccctcggcactaggcagcggaggagc

SEQ ID NO: 30993 - DNA, 40 bp, Artificial Sequence
  Description of Artificial Sequence: Synthetic primer
ggtctcggactgctgccggatgtagttctggaagctcttg

SEQ ID NO: 30994 - DNA, 40 bp, Artificial Sequence
  Description of Artificial Sequence: Synthetic primer
tcagtcccattgggattaggtatggaattttctattttac

SEQ ID NO: 30995 - DNA, 40 bp, Artificial Sequence
  Description of Artificial Sequence: Synthetic primer
gttctatgccctcaactacagcctccggcagcgcatggac

SEQ ID NO: 30996 - DNA, 40 bp, Artificial Sequence
  Description of Artificial Sequence: Synthetic primer
atagtagtccggtgtcatgaggcccaggttctgcctttgc

SEQ ID NO: 30997 - DNA, 40 bp, Artificial Sequence
  Description of Artificial Sequence: Synthetic primer
ggcaaagacctgaccagtgtcaatatcctgctgaaaaagc

SEQ ID NO: 30998 - DNA, 40 bp, Artificial Sequence
  Description of Artificial Sequence: Synthetic primer
agccctcaggccagctcccgcacacctccagcagggtcac

SEQ ID NO: 30999 - DNA, 40 bp, Artificial Sequence
  Description of Artificial Sequence: Synthetic primer
cttgtgcctccattcccgggaggggggagcggcgttggag

SEQ ID NO: 31000 - DNA, 40 bp, Artificial Sequence
  Description of Artificial Sequence: Synthetic primer
cagcagttcctcagagacacgaagcaagccgaagcctttc

SEQ ID NO: 31001 - DNA, 40 bp, Artificial Sequence
  Description of Artificial Sequence: Synthetic primer
ctggtgctgttctcactaagattccatattcttgctgttg

SEQ ID NO: 31002 - DNA, 40 bp, Artificial Sequence
  Description of Artificial Sequence: Synthetic primer
cactgtgcactgtgaacagtttcttgcatatgcttccaga

SEQ ID NO: 31003 - DNA, 40 bp, Artificial Sequence
  Description of Artificial Sequence: Synthetic primer
agccctgttccaggtctatcaagcagcccttctgggtcac

SEQ ID NO: 31004 - DNA, 40 bp, Artificial Sequence
  Description of Artificial Sequence: Synthetic primer
agaggtgtcaatgcctccgcccagaagttcgcaacagacg

SEQ ID NO: 31005 - DNA, 40 bp, Artificial Sequence
  Description of Artificial Sequence: Synthetic primer
tgaaaactgaacaatgaagttctttaacatgtacaaaaac

SEQ ID NO: 31006 - DNA, 40 bp, Artificial Sequence
  Description of Artificial Sequence: Synthetic primer
cagtacggtcagtctgcatctcatgctaactttttgttgg

SEQ ID NO: 31007 - DNA, 40 bp, Artificial Sequence
  Description of Artificial Sequence: Synthetic primer
tcttcaagtctgtcgccaaaagcgataatttcagttggac

SEQ ID NO: 31008 - DNA, 40 bp, Artificial Sequence
  Description of Artificial Sequence: Synthetic primer
ctcttcaagacattaggtgtgaacagagaaggggaatgag

SEQ ID NO: 31009 - DNA, 40 bp, Artificial Sequence
  Description of Artificial Sequence: Synthetic primer
gtgaaagtcaggaggttctgttggctaccatggtttctgc

SEQ ID NO: 31010 - DNA, 40 bp, Artificial Sequence
  Description of Artificial Sequence: Synthetic primer
tgctcagggttggaatcaagttgttctattctcaacagac

SEQ ID NO: 31011 - DNA, 40 bp, Artificial Sequence
  Description of Artificial Sequence: Synthetic primer
gctcatcaggctgtgcggcctgtaacctctgatggcgaac

SEQ ID NO: 31012 - DNA, 40 bp, Artificial Sequence
  Description of Artificial Sequence: Synthetic primer
actggacccatggaagtggattaagaaaaaccgactttag

SEQ ID NO: 31013 - DNA, 40 bp, Artificial Sequence
  Description of Artificial Sequence: Synthetic primer
ctcattcctggaccagcaggcaaaacaaagctagagaaac

SEQ ID NO: 31014 - DNA, 40 bp, Artificial Sequence
  Description of Artificial Sequence: Synthetic primer
ggaccacacacttgatgaggaggctggcaaacagtttctg

SEQ ID NO: 31015 - DNA, 40 bp, Artificial Sequence
  Description of Artificial Sequence: Synthetic primer
acgtcccgcgcgtcggcggccgcggagcagcgcagggagc

SEQ ID NO: 31016 - DNA, 40 bp, Artificial Sequence
  Description of Artificial Sequence: Synthetic primer
catggaggctgtgctgaccgggctggtggaggccgcactg

SEQ ID NO: 31017 - DNA, 40 bp, Artificial Sequence
  Description of Artificial Sequence: Synthetic primer
tagcacgctgcctgacgcccagcgccagggagagccctac

SEQ ID NO: 31018 - DNA, 40 bp, Artificial Sequence
  Description of Artificial Sequence: Synthetic primer
cgcctcggaggacatgccaaacaccctgaccgaggctgag

SEQ ID NO: 31019 - DNA, 40 bp, Artificial Sequence
  Description of Artificial Sequence: Synthetic primer
ttgtcagttgagtttggcagaaggttcaacagtatgaatg

SEQ ID NO: 31020 - DNA, 40 bp, Artificial Sequence
  Description of Artificial Sequence: Synthetic primer
cagtggcttctacactgtggaagacacacactatgtcacc

SEQ ID NO: 31021 - DNA, 40 bp, Artificial Sequence
  Description of Artificial Sequence: Synthetic primer
cttggaccctgcagtgtcaggcaaagtctggatataggtc

SEQ ID NO: 31022 - DNA, 40 bp, Artificial Sequence
  Description of Artificial Sequence: Synthetic primer
gctgtttttgaagtgatattatctgttttcttcctttttc

SEQ ID NO: 31023 - DNA, 40 bp, Artificial Sequence
  Description of Artificial Sequence: Synthetic primer
cctccagagagacatcaatcccacggtcaaattcctcacg

SEQ ID NO: 31024 - DNA, 40 bp, Artificial Sequence
  Description of Artificial Sequence: Synthetic primer
tgaaaagaataaaaataagcagctgaggaattactgtcac

SEQ ID NO: 31025 - DNA, 40 bp, Artificial Sequence
  Description of Artificial Sequence: Synthetic primer
acgaggacacaccccgaaagaagcgctcccagtccttcac

SEQ ID NO: 31026 - DNA, 40 bp, Artificial Sequence
  Description of Artificial Sequence: Synthetic primer
gccacggttgccgagcccgggagctcgcgggcgcagcgcg

SEQ ID NO: 31027 - DNA, 40 bp, Artificial Sequence
  Description of Artificial Sequence: Synthetic primer
cagagacttgaaaccagaaaacttaattctagatgctgag

SEQ ID NO: 31028 - DNA, 40 bp, Artificial Sequence
  Description of Artificial Sequence: Synthetic primer
agtaccacataggaggactgcagagctgtcgctggtgctg

SEQ ID NO: 31029 - DNA, 40 bp, Artificial Sequence
  Description of Artificial Sequence: Synthetic primer
agtcaagggaaagttctcctggaccaaggcttgggaaagg

SEQ ID NO: 31030 - DNA, 40 bp, Artificial Sequence
  Description of Artificial Sequence: Synthetic primer
cagctgcaactgacttagctcccacccctgaaggtaaaaa

SEQ ID NO: 31031 - DNA, 40 bp, Artificial Sequence
  Description of Artificial Sequence: Synthetic primer
gacagacggcattgatgtcggttccgtccgagccttctgg

SEQ ID NO: 31032 - DNA, 40 bp, Artificial Sequence
  Description of Artificial Sequence: Synthetic primer
cttgtggtttttcttgttgttattcagaaaagatgtgcag

SEQ ID NO: 31033 - DNA, 40 bp, Artificial Sequence
  Description of Artificial Sequence: Synthetic primer
gtcagaaaactggtagagtaagaccagctaatgaactacg

SEQ ID NO: 31034 - DNA, 40 bp, Artificial Sequence
  Description of Artificial Sequence: Synthetic primer
ccagtaaagttggcctaactcagcattactctcactgtgc

SEQ ID NO: 31035 - DNA, 40 bp, Artificial Sequence
  Description of Artificial Sequence: Synthetic primer
cctctcctcctcttgaattggaatgtagcatagcattgag

SEQ ID NO: 31036 - DNA, 40 bp, Artificial Sequence
  Description of Artificial Sequence: Synthetic primer
cactcctgtaacggagttctctttaaacacataccagacc

SEQ ID NO: 31037 - DNA, 40 bp, Artificial Sequence
  Description of Artificial Sequence: Synthetic primer
gtaacaggtcttccacaccaagtaagtgtttgccatagtc

SEQ ID NO: 31038 - DNA, 40 bp, Artificial Sequence
  Description of Artificial Sequence: Synthetic primer
cagaacttttatagaatatgatattataaagttaaatttg

SEQ ID NO: 31039 - DNA, 40 bp, Artificial Sequence
  Description of Artificial Sequence: Synthetic primer
gggcagggggccccctctggcagaggggggcaccccattg

SEQ ID NO: 31040 - DNA, 40 bp, Artificial Sequence
  Description of Artificial Sequence: Synthetic primer
gggacgagcactgggtgaaggacctgggcagcctcaatgg

SEQ ID NO: 31041 - DNA, 40 bp, Artificial Sequence
  Description of Artificial Sequence: Synthetic primer
cagcgtgctcagggcaaggagcctaatctttcattattac

SEQ ID NO: 31042 - DNA, 40 bp, Artificial Sequence
  Description of Artificial Sequence: Synthetic primer
ttcttcttcgtcctgatacatatattgggtcagtggagcc

SEQ ID NO: 31043 - DNA, 40 bp, Artificial Sequence
  Description of Artificial Sequence: Synthetic primer
gagtccaggagaaaattcacatgaggggttgatggtcctg

SEQ ID NO: 31044 - DNA, 40 bp, Artificial Sequence
  Description of Artificial Sequence: Synthetic primer
actccgtgtcgcagggctgcagcgggtcctgcttcttgtg

SEQ ID NO: 31045 - DNA, 40 bp, Artificial Sequence
  Description of Artificial Sequence: Synthetic primer
gaaaacagagaaaactacaggtttgctgggggtgtgtatg

SEQ ID NO: 31046 - DNA, 40 bp, Artificial Sequence
  Description of Artificial Sequence: Synthetic primer
aaactggtatggacagaagtcctggtaaatcaccatcagc

SEQ ID NO: 31047 - DNA, 40 bp, Artificial Sequence
  Description of Artificial Sequence: Synthetic primer
ccattggatattactaagttttctaagcaatttgtacctg

SEQ ID NO: 31048 - DNA, 40 bp, Artificial Sequence
  Description of Artificial Sequence: Synthetic primer
gtttctagggtcagagcagagcttctgagaaaggcacacg

SEQ ID NO: 31049 - DNA, 40 bp, Artificial Sequence
  Description of Artificial Sequence: Synthetic primer
taaatgagattagcgtctaatgagtagcacccctttacta

SEQ ID NO: 31050 - DNA, 40 bp, Artificial Sequence
  Description of Artificial Sequence: Synthetic primer
tttttccactcaggggcaaaattcttaatgtacgggaagc

SEQ ID NO: 31051 - DNA, 40 bp, Artificial Sequence
  Description of Artificial Sequence: Synthetic primer
ctttggcgacctctcagagctgggagcggggtcccgaagg

SEQ ID NO: 31052 - DNA, 40 bp, Artificial Sequence
  Description of Artificial Sequence: Synthetic primer
tccatctgtgtgaacggtgaccaagtcttttgtttctgtg

SEQ ID NO: 31053 - DNA, 40 bp, Artificial Sequence
  Description of Artificial Sequence: Synthetic primer
cagaaagggctggggacacggaaacccttaaagacatcac

SEQ ID NO: 31054 - DNA, 40 bp, Artificial Sequence
  Description of Artificial Sequence: Synthetic primer
ttgagttaccacactcagagagttaatggtgtccactgtc

SEQ ID NO: 31055 - DNA, 40 bp, Artificial Sequence
  Description of Artificial Sequence: Synthetic primer
aaatccaaaatctttcccatacatgattaaatatatgata

SEQ ID NO: 31056 - DNA, 40 bp, Artificial Sequence
  Description of Artificial Sequence: Synthetic primer
tgtctgttagggaaatcaccagctttggcatcttaacaac

SEQ ID NO: 31057 - DNA, 40 bp, Artificial Sequence
  Description of Artificial Sequence: Synthetic primer
agaagcttaaaggaagcagaaaatgtgtggcggattactg

SEQ ID NO: 31058 - DNA, 40 bp, Artificial Sequence
  Description of Artificial Sequence: Synthetic primer
ctcttccttctcctgtttaagatttttcaaccatttgtgg

SEQ ID NO: 31059 - DNA, 40 bp, Artificial Sequence
  Description of Artificial Sequence: Synthetic primer
acttctctaagatgaaggccttagctgttgaaggaaaacg

SEQ ID NO: 31060 - DNA, 40 bp, Artificial Sequence
  Description of Artificial Sequence: Synthetic primer
caaggccaagatcaccggcggctatcggctcccggccaag

SEQ ID NO: 31061 - DNA, 40 bp, Artificial Sequence
  Description of Artificial Sequence: Synthetic primer
tgtgttcttcttggaggtcatggatctcagccttcactgc

SEQ ID NO: 31062 - DNA, 40 bp, Artificial Sequence
  Description of Artificial Sequence: Synthetic primer
ccccaggtggtgtttgggcagcccccgcccttggagacag

SEQ ID NO: 31063 - DNA, 40 bp, Artificial Sequence
  Description of Artificial Sequence: Synthetic primer
tgtgagccacaacaacctgaccacgcttcatggggagctg

SEQ ID NO: 31064 - DNA, 40 bp, Artificial Sequence
  Description of Artificial Sequence: Synthetic primer
gatgcaaactttcctttagggctttgtaaagaagttttgg

SEQ ID NO: 31065 - DNA, 40 bp, Artificial Sequence
  Description of Artificial Sequence: Synthetic primer
aatgtgggctgtctcacatcccacctcccgctgggtgaat

SEQ ID NO: 31066 - DNA, 40 bp, Artificial Sequence
  Description of Artificial Sequence: Synthetic primer
cttcaggacctgaggaggctgcttctcaatgatgaacgtg

SEQ ID NO: 31067 - DNA, 40 bp, Artificial Sequence
  Description of Artificial Sequence: Synthetic primer
acccagcatattttaggtggcagttagccgttacaagaag

SEQ ID NO: 31068 - DNA, 40 bp, Artificial Sequence
  Description of Artificial Sequence: Synthetic primer
tttggccatttaacccggcggagttgtgaaagctgggtag

SEQ ID NO: 31069 - DNA, 40 bp, Artificial Sequence
  Description of Artificial Sequence: Synthetic primer
agtagatcatacgaatgaacagcagaaaatcctggagcag

SEQ ID NO: 31070 - DNA, 40 bp, Artificial Sequence
  Description of Artificial Sequence: Synthetic primer
gtccatggccagatggcccagcaggctctgcagcatgggc

SEQ ID NO: 31071 - DNA, 40 bp, Artificial Sequence
  Description of Artificial Sequence: Synthetic primer
ggacccaactggcaatctcttggcctcctgttctgacgac

SEQ ID NO: 31072 - DNA, 40 bp, Artificial Sequence
  Description of Artificial Sequence: Synthetic primer
tcctctccttttctatacgatcttcaatgatgacctgttc

SEQ ID NO: 31073 - DNA, 40 bp, Artificial Sequence
  Description of Artificial Sequence: Synthetic primer
tccagcctctggtgccaacacagttgccaaacccattgag

SEQ ID NO: 31074 - DNA, 40 bp, Artificial Sequence
  Description of Artificial Sequence: Synthetic primer
tcaaggtttccagggctgcccgggccagagaggagtaaag

SEQ ID NO: 31075 - DNA, 40 bp, Artificial Sequence
  Description of Artificial Sequence: Synthetic primer
gatgaagaggaaaagctggaggatgacgataagtcggaag

SEQ ID NO: 31076 - DNA, 40 bp, Artificial Sequence
  Description of Artificial Sequence: Synthetic primer
gactgattgtcatcaagatcggtgatagaatccactgaca

SEQ ID NO: 31077 - DNA, 40 bp, Artificial Sequence
  Description of Artificial Sequence: Synthetic primer
gttatattcgattttagtctccccctaccccctagaaaaa

SEQ ID NO: 31078 - DNA, 40 bp, Artificial Sequence
  Description of Artificial Sequence: Synthetic primer
caactttatcattgaaaaaaattagcaaaatattttactc

SEQ ID NO: 31079 - DNA, 40 bp, Artificial Sequence
  Description of Artificial Sequence: Synthetic primer
gttgttttataaactgcctggccgaatcagccttttcacg

SEQ ID NO: 31080 - DNA, 40 bp, Artificial Sequence
  Description of Artificial Sequence: Synthetic primer
aacaaaacgctaaggtgggtagcctaagctgattttctgc

SEQ ID NO: 31081 - DNA, 40 bp, Artificial Sequence
  Description of Artificial Sequence: Synthetic primer
cactagggctttggctgcctctagctctccagtggtctcc

SEQ ID NO: 31082 - DNA, 40 bp, Artificial Sequence
  Description of Artificial Sequence: Synthetic primer
agatggcaactcaggaagttcctactggtcttgaacactg

SEQ ID NO: 31083 - DNA, 40 bp, Artificial Sequence
  Description of Artificial Sequence: Synthetic primer
gaccacggagatccggtttgctgactccaagaggaagtcg

SEQ ID NO: 31084 - DNA, 40 bp, Artificial Sequence
  Description of Artificial Sequence: Synthetic primer
gaggagtgtctgccggatcagctggaactcccctgcagag

SEQ ID NO: 31085 - DNA, 40 bp, Artificial Sequence
  Description of Artificial Sequence: Synthetic primer
tgtgtaggcacaggggttgggtctcttcgacttgagatgg

SEQ ID NO: 31086 - DNA, 40 bp, Artificial Sequence
  Description of Artificial Sequence: Synthetic primer
ctccaccagtcaactttttctctccagcattccactgaag

SEQ ID NO: 31087 - DNA, 40 bp, Artificial Sequence
  Description of Artificial Sequence: Synthetic primer
tttcccataaaccacatgccccccagtcctctcttaaaag

SEQ ID NO: 31088 - DNA, 40 bp, Artificial Sequence
  Description of Artificial Sequence: Synthetic primer
gtacgcaaccagggctgcgaaggagaccaccagggcgttg

SEQ ID NO: 31089 - DNA, 40 bp, Artificial Sequence
  Description of Artificial Sequence: Synthetic primer
cattgctgctttatgcaagtggcatggagtcaacataccc

SEQ ID NO: 31090 - DNA, 40 bp, Artificial Sequence
  Description of Artificial Sequence: Synthetic primer
tatcatgtcttttactctgtttataatatcaagtattttc

SEQ ID NO: 31091 - DNA, 40 bp, Artificial Sequence
  Description of Artificial Sequence: Synthetic primer
aggcggcctgggctccaaggccgaatgagaacacgctagc

SEQ ID NO: 31092 - DNA, 40 bp, Artificial Sequence
  Description of Artificial Sequence: Synthetic primer
acggtctgcgggcttgggcggcatgaccaggttggggttc

SEQ ID NO: 31093 - DNA, 40 bp, Artificial Sequence
  Description of Artificial Sequence: Synthetic primer
gtccgcctggacgaggatccctttaaaacaaggctcgatg

SEQ ID NO: 31094 - DNA, 40 bp, Artificial Sequence
  Description of Artificial Sequence: Synthetic primer
aagacccacacacactacaaaaatggagagtatccaggtc

SEQ ID NO: 31095 - DNA, 40 bp, Artificial Sequence
  Description of Artificial Sequence: Synthetic primer
tagcatttcttctaaaagaattggatattctcagaacaag

SEQ ID NO: 31096 - DNA, 40 bp, Artificial Sequence
  Description of Artificial Sequence: Synthetic primer
ccacggagttgaatctgctggggctgcctgccgggccctg

SEQ ID NO: 31097 - DNA, 40 bp, Artificial Sequence
  Description of Artificial Sequence: Synthetic primer
caagattggctgagccgtcaaagaggaacagaatgtctcg

SEQ ID NO: 31098 - DNA, 40 bp, Artificial Sequence
  Description of Artificial Sequence: Synthetic primer
acgatttctaactagaatgacacgagtgtctgaatttctc

SEQ ID NO: 31099 - DNA, 40 bp, Artificial Sequence
  Description of Artificial Sequence: Synthetic primer
ggttaccccagaaaaatgctgctcagtttttattgtctac

SEQ ID NO: 31100 - DNA, 40 bp, Artificial Sequence
  Description of Artificial Sequence: Synthetic primer
cccttgagggcctggtctacaggagccccacagccactcg

SEQ ID NO: 31101 - DNA, 40 bp, Artificial Sequence
  Description of Artificial Sequence: Synthetic primer
tttctctcgcccaatcacatacacacacttgggcgtcagg

SEQ ID NO: 31102 - DNA, 40 bp, Artificial Sequence
  Description of Artificial Sequence: Synthetic primer
gcggattccatcttcaaggcatctttctactttttgttgc

SEQ ID NO: 31103 - DNA, 40 bp, Artificial Sequence
  Description of Artificial Sequence: Synthetic primer
tcctttgttctgtagcgccgttgaccatttcgcttgtgtc

SEQ ID NO: 31104 - DNA, 40 bp, Artificial Sequence
  Description of Artificial Sequence: Synthetic primer
gttccattgaaaccttgcaggacagagtcaacaagtggtc

SEQ ID NO: 31105 - DNA, 40 bp, Artificial Sequence
  Description of Artificial Sequence: Synthetic primer
tctgtgaagccagccgctgcaaagccggcccctgcgaaac

SEQ ID NO: 31106 - DNA, 40 bp, Artificial Sequence
  Description of Artificial Sequence: Synthetic primer
caagacaggaggctacctggtttactgcacctgttctatc

SEQ ID NO: 31107 - DNA, 40 bp, Artificial Sequence
  Description of Artificial Sequence: Synthetic primer
caaagaagttggaagaattttccaaaagagtagaaaaaaa

SEQ ID NO: 31108 - DNA, 40 bp, Artificial Sequence
  Description of Artificial Sequence: Synthetic primer
atcaacagcactgttattactacttgggtttttcctgtgg

SEQ ID NO: 31109 - DNA, 40 bp, Artificial Sequence
  Description of Artificial Sequence: Synthetic primer
cccctagagttatatccacacctccaacacctatctttcc

SEQ ID NO: 31110 - DNA, 40 bp, Artificial Sequence
  Description of Artificial Sequence: Synthetic primer
gttgaatgccaagttccccagatatcgaaaggctcctctg

SEQ ID NO: 31111 - DNA, 40 bp, Artificial Sequence
  Description of Artificial Sequence: Synthetic primer
tgttctctgcaacaggaggtaccacatttatcttgttgac

SEQ ID NO: 31112 - DNA, 40 bp, Artificial Sequence
  Description of Artificial Sequence: Synthetic primer
tttcagcctgaattctaagcaacaacttcaggttgggggc

SEQ ID NO: 31113 - DNA, 40 bp, Artificial Sequence
  Description of Artificial Sequence: Synthetic primer
acagaagaagaagaaggagcgcacgtgggccgaggccgcg

SEQ ID NO: 31114 - DNA, 40 bp, Artificial Sequence
  Description of Artificial Sequence: Synthetic primer
aaaaagatcactagctgtctgttttggcttaattgaagtg

SEQ ID NO: 31115 - DNA, 40 bp, Artificial Sequence
  Description of Artificial Sequence: Synthetic primer
taagtagttcatttactgatccaaacctagcatagcaatc

SEQ ID NO: 31116 - DNA, 40 bp, Artificial Sequence
  Description of Artificial Sequence: Synthetic primer
atgattcattagcaggtagccatgctgatgaataatctgg

SEQ ID NO: 31117 - DNA, 40 bp, Artificial Sequence
  Description of Artificial Sequence: Synthetic primer
tgtctccttatgggaactggaagtattttgacatctttac

SEQ ID NO: 31118 - DNA, 40 bp, Artificial Sequence
  Description of Artificial Sequence: Synthetic primer
ccaccggttgatttatttgcaactgcatctgcggctgtcc

SEQ ID NO: 31119 - DNA, 40 bp, Artificial Sequence
  Description of Artificial Sequence: Synthetic primer
tattacttcctctgttcgcgactagttggctctgagatac

SEQ ID NO: 31120 - DNA, 40 bp, Artificial Sequence
  Description of Artificial Sequence: Synthetic primer
ttgaaaaaggagcctttgggggcccagcctgcctggcatt

SEQ ID NO: 31121 - DNA, 40 bp, Artificial Sequence
  Description of Artificial Sequence: Synthetic primer
ctgtgtttgaatttctagaggctacccaggccaagaatac

SEQ ID NO: 31122 - DNA, 40 bp, Artificial Sequence
  Description of Artificial Sequence: Synthetic primer
gactactaaggagtgaaaaggtatgtcaaacagctgatac

SEQ ID NO: 31123 - DNA, 40 bp, Artificial Sequence
  Description of Artificial Sequence: Synthetic primer
aagttctctagacaggtgttttcctcatacactggaaagg

SEQ ID NO: 31124 - DNA, 40 bp, Artificial Sequence
  Description of Artificial Sequence: Synthetic primer
agatatttgcagtaatctttaaattacagatataccttgg

SEQ ID NO: 31125 - DNA, 40 bp, Artificial Sequence
  Description of Artificial Sequence: Synthetic primer
cgccctggcccagggcaccacatgtgggtgacgggccagg

SEQ ID NO: 31126 - DNA, 40 bp, Artificial Sequence
  Description of Artificial Sequence: Synthetic primer
agcctgaagggccacacattggcaggagaagagttcatgg

SEQ ID NO: 31127 - DNA, 40 bp, Artificial Sequence
  Description of Artificial Sequence: Synthetic primer
ggtttcactaaagaacagcaacgactggggatcccaaaag

SEQ ID NO: 31128 - DNA, 40 bp, Artificial Sequence
  Description of Artificial Sequence: Synthetic primer
catctggccatggacagccagcggcgcccgctcctgctgc

SEQ ID NO: 31129 - DNA, 40 bp, Artificial Sequence
  Description of Artificial Sequence: Synthetic primer
taaaaagtatttaaataccacaaatgacatttaatttcac

SEQ ID NO: 31130 - DNA, 40 bp, Artificial Sequence
  Description of Artificial Sequence: Synthetic primer
ggatcctggacatgtgttgtgcccctggaggaaagaccag

SEQ ID NO: 31131 - DNA, 40 bp, Artificial Sequence
  Description of Artificial Sequence: Synthetic primer
ctggcaggcctcatgggcttccctccaggactggcaacag

SEQ ID NO: 31132 - DNA, 40 bp, Artificial Sequence
  Description of Artificial Sequence: Synthetic primer
tacgtgcaaagtccattatccggtcaacctccacataatc

SEQ ID NO: 31133 - DNA, 40 bp, Artificial Sequence
  Description of Artificial Sequence: Synthetic primer
tatgcatcagcaacgatcgtggactatctgggcttccatc

SEQ ID NO: 31134 - DNA, 40 bp, Artificial Sequence
  Description of Artificial Sequence: Synthetic primer
tcggtccactaacctgagtcatatccggcactggtttctc

SEQ ID NO: 31135 - DNA, 40 bp, Artificial Sequence
  Description of Artificial Sequence: Synthetic primer
gtctcctcatctcgactttccatctgttgctggatttctc

SEQ ID NO: 31136 - DNA, 40 bp, Artificial Sequence
  Description of Artificial Sequence: Synthetic primer
ttgaggcagcttttgggacaacgccttcaacttccagcag

SEQ ID NO: 31137 - DNA, 40 bp, Artificial Sequence
  Description of Artificial Sequence: Synthetic primer
cagggtttggagaagcagttggaacccacgtgtggtgatg

SEQ ID NO: 31138 - DNA, 40 bp, Artificial Sequence
  Description of Artificial Sequence: Synthetic primer
aaactgaagagcctacccgttttgttaatcatatattttg

SEQ ID NO: 31139 - DNA, 40 bp, Artificial Sequence
  Description of Artificial Sequence: Synthetic primer
cattgtctccactcgccattaccgagcaccagaagtcatc

SEQ ID NO: 31140 - DNA, 40 bp, Artificial Sequence
  Description of Artificial Sequence: Synthetic primer
atggaagtgttaaaaaaacatctcaagcctcattggaatg

SEQ ID NO: 31141 - DNA, 40 bp, Artificial Sequence
  Description of Artificial Sequence: Synthetic primer
ggcaggccgggccttcctgcatctgcactctccgtaccgg

SEQ ID NO: 31142 - DNA, 40 bp, Artificial Sequence
  Description of Artificial Sequence: Synthetic primer
ttaaaacattgcacagccactgccgaggggtgggaaggag

SEQ ID NO: 31143 - DNA, 40 bp, Artificial Sequence
  Description of Artificial Sequence: Synthetic primer
ggtccttattatgttaatgatggtgcaatactctcacctg

SEQ ID NO: 31144 - DNA, 40 bp, Artificial Sequence
  Description of Artificial Sequence: Synthetic primer
agcagcggcagcgcctccatgaccacgcgagcgcagaaac

SEQ ID NO: 31145 - DNA, 40 bp, Artificial Sequence
  Description of Artificial Sequence: Synthetic primer
attaaataccttttacagatactgaaagtgcctccttttg

SEQ ID NO: 31146 - DNA, 40 bp, Artificial Sequence
  Description of Artificial Sequence: Synthetic primer
acataatgtggaagttattgtcatgataacaaacctcgtg

SEQ ID NO: 31147 - DNA, 40 bp, Artificial Sequence
  Description of Artificial Sequence: Synthetic primer
cgcttatgttttctcaagttgaaccacccagcagtgatgc

SEQ ID NO: 31148 - DNA, 40 bp, Artificial Sequence
  Description of Artificial Sequence: Synthetic primer
tgccaaaaaatttatggaagaaaacgaaaaactaaaaagg

SEQ ID NO: 31149 - DNA, 40 bp, Artificial Sequence
  Description of Artificial Sequence: Synthetic primer
gcacccttaccccgccctcgccatgaacgcctcgatgtcc

SEQ ID NO: 31150 - DNA, 40 bp, Artificial Sequence
  Description of Artificial Sequence: Synthetic primer
aaggttggcggtcggaccctcacggtcagcgtgggcgatg

SEQ ID NO: 31151 - DNA, 40 bp, Artificial Sequence
  Description of Artificial Sequence: Synthetic primer
cgcagcgtggccagcacgatctcggcggccgcctcacagg

SEQ ID NO: 31152 - DNA, 40 bp, Artificial Sequence
  Description of Artificial Sequence: Synthetic primer
ctttaagtttcccagagaaaatgagatgctgatgttgaag

SEQ ID NO: 31153 - DNA, 40 bp, Artificial Sequence
  Description of Artificial Sequence: Synthetic primer
tttgtgtgtgcgtacgtgtggtttttttaaatatcactac

SEQ ID NO: 31154 - DNA, 40 bp, Artificial Sequence
  Description of Artificial Sequence: Synthetic primer
tgtgaggacgccctggccaacaagacgcggcctcggaacc

SEQ ID NO: 31155 - DNA, 40 bp, Artificial Sequence
  Description of Artificial Sequence: Synthetic primer
gacttagacaaaacacccccaccatctcctcctcctgaag

SEQ ID NO: 31156 - DNA, 40 bp, Artificial Sequence
  Description of Artificial Sequence: Synthetic primer
cactacagcatcttatattttttgagttgagtttcaataa

SEQ ID NO: 31157 - DNA, 40 bp, Artificial Sequence
  Description of Artificial Sequence: Synthetic primer
cacagctatacacgaagaatctcagcccttgtacttttgc

SEQ ID NO: 31158 - DNA, 40 bp, Artificial Sequence
  Description of Artificial Sequence: Synthetic primer
ttcctttgagaatcaaattgtaggtcatcatttggtcaac

SEQ ID NO: 31159 - DNA, 40 bp, Artificial Sequence
  Description of Artificial Sequence: Synthetic primer
tccaaatttctggcaaaagtgggctaagaaggctgaattg

SEQ ID NO: 31160 - DNA, 40 bp, Artificial Sequence
  Description of Artificial Sequence: Synthetic primer
aggatttccctgattgaggccctcttggccttgggaaaac

SEQ ID NO: 31161 - DNA, 40 bp, Artificial Sequence
  Description of Artificial Sequence: Synthetic primer
ttcccacttgtcgatcatttctttcctcttttccgtcaac

SEQ ID NO: 31162 - DNA, 40 bp, Artificial Sequence
  Description of Artificial Sequence: Synthetic primer
taaggtacaggcagaggtggccaggggagtttcattgtgg

SEQ ID NO: 31163 - DNA, 40 bp, Artificial Sequence
  Description of Artificial Sequence: Synthetic primer
tagacggtctctcccgtcggaagcaagtacaggttgttac

SEQ ID NO: 31164 - DNA, 40 bp, Artificial Sequence
  Description of Artificial Sequence: Synthetic primer
aaacagtagatagacttggagggattttgtgggggaattg

SEQ ID NO: 31165 - DNA, 40 bp, Artificial Sequence
  Description of Artificial Sequence: Synthetic primer
gctatgccgtgctgcggctccggcactggtgggtgattgc

SEQ ID NO: 31166 - DNA, 40 bp, Artificial Sequence
  Description of Artificial Sequence: Synthetic primer
cggtgtccgaggtcttggtacagaagacttttgcatgttg

SEQ ID NO: 31167 - DNA, 40 bp, Artificial Sequence
  Description of Artificial Sequence: Synthetic primer
ggagggctttggcagccaaagtccactggccctgccgtgc

SEQ ID NO: 31168 - DNA, 40 bp, Artificial Sequence
  Description of Artificial Sequence: Synthetic primer
aagtgctgggaatcttaaagctatagataagcccaagtag

SEQ ID NO: 31169 - DNA, 40 bp, Artificial Sequence
  Description of Artificial Sequence: Synthetic primer
attcttcctgtgttgtgactggacagttttccagatcttt

SEQ ID NO: 31170 - DNA, 40 bp, Artificial Sequence
  Description of Artificial Sequence: Synthetic primer
gtccacgtcttcctcctcaaagtcaaagtgggacttcttg

SEQ ID NO: 31171 - DNA, 40 bp, Artificial Sequence
  Description of Artificial Sequence: Synthetic primer
aagaagtatttctcaattcagtttatcgaaatacttcagc

SEQ ID NO: 31172 - DNA, 40 bp, Artificial Sequence
  Description of Artificial Sequence: Synthetic primer
cgttctccagctcccgcgggcactctgtcagctggttgtg

SEQ ID NO: 31173 - DNA, 40 bp, Artificial Sequence
  Description of Artificial Sequence: Synthetic primer
actgattacccgactctctgggaaatccagagtatataag

SEQ ID NO: 31174 - DNA, 40 bp, Artificial Sequence
  Description of Artificial Sequence: Synthetic primer
aggtccctttctcttaccatgacagaggctgggggcagac

SEQ ID NO: 31175 - DNA, 40 bp, Artificial Sequence
  Description of Artificial Sequence: Synthetic primer
atcactactgtcttgtggcctggaaattaaaatggatcac

SEQ ID NO: 31176 - DNA, 40 bp, Artificial Sequence
  Description of Artificial Sequence: Synthetic primer
agtgcatatggctactatctgaagaacataactcatattg

SEQ ID NO: 31177 - DNA, 40 bp, Artificial Sequence
  Description of Artificial Sequence: Synthetic primer
cactagccaagttgcagcagaaggcgtcggagccgaccag

SEQ ID NO: 31178 - DNA, 40 bp, Artificial Sequence
  Description of Artificial Sequence: Synthetic primer
ctggaacttggtctgagtcttcagtacctgggggggctgc

SEQ ID NO: 31179 - DNA, 40 bp, Artificial Sequence
  Description of Artificial Sequence: Synthetic primer
ggcccccacctcagggcggggagggcgcggcctcagcagc

SEQ ID NO: 31180 - DNA, 40 bp, Artificial Sequence
  Description of Artificial Sequence: Synthetic primer
gacatctcccgagttctcagtgggtctctgcggacggttc

SEQ ID NO: 31181 - DNA, 40 bp, Artificial Sequence
  Description of Artificial Sequence: Synthetic primer
gcagccgccgctcccgcctccctgcgggccgctgggcccc

SEQ ID NO: 31182 - DNA, 40 bp, Artificial Sequence
  Description of Artificial Sequence: Synthetic primer
gcagggattcctgggaagaaatacagcagagacttttaac

SEQ ID NO: 31183 - DNA, 40 bp, Artificial Sequence
  Description of Artificial Sequence: Synthetic primer
atttggcttctagaaatacactattcaatctcagcaattt

SEQ ID NO: 31184 - DNA, 40 bp, Artificial Sequence
  Description of Artificial Sequence: Synthetic primer
ggtgaagagcagcacttccaagttccccttctcagtaaat

SEQ ID NO: 31185 - DNA, 40 bp, Artificial Sequence
  Description of Artificial Sequence: Synthetic primer
ttcaatcagtttaccaacaacttgatctaccacataatcc

SEQ ID NO: 31186 - DNA, 40 bp, Artificial Sequence
  Description of Artificial Sequence: Synthetic primer
aagactggcatggccacagtggtgagcagtgtcaggctct

SEQ ID NO: 31187 - DNA, 40 bp, Artificial Sequence
  Description of Artificial Sequence: Synthetic primer
ggcgcccaacagcccagcctctaccagatccgcaccaacg

SEQ ID NO: 31188 - DNA, 40 bp, Artificial Sequence
  Description of Artificial Sequence: Synthetic primer
atttattttaagtgagatcaggaatggactactttgtgac

SEQ ID NO: 31189 - DNA, 40 bp, Artificial Sequence
  Description of Artificial Sequence: Synthetic primer
agaaatgctcttgtatatctttctaacaaatagtaaaatc

SEQ ID NO: 31190 - DNA, 40 bp, Artificial Sequence
  Description of Artificial Sequence: Synthetic primer
tcctgggccctgagcagcctccccaggatagcatcatctc

SEQ ID NO: 31191 - DNA, 40 bp, Artificial Sequence
  Description of Artificial Sequence: Synthetic primer
ggttgaactattacttttccaaggacggttgaagaaattg

SEQ ID NO: 31192 - DNA, 40 bp, Artificial Sequence
  Description of Artificial Sequence: Synthetic primer
ggagaccttacagagaatgcacactacatttgagcatgac

SEQ ID NO: 31193 - DNA, 40 bp, Artificial Sequence
  Description of Artificial Sequence: Synthetic primer
actgtgtcatatattgtacaacaaaagtgaacacggaacc

SEQ ID NO: 31194 - DNA, 40 bp, Artificial Sequence
  Description of Artificial Sequence: Synthetic primer
gactattgtttgttgatgttggaatttgtatttacagaga

SEQ ID NO: 31195 - DNA, 40 bp, Artificial Sequence
  Description of Artificial Sequence: Synthetic primer
gaactgggttcccgagtgcttgagctgtggctcccgctgt

SEQ ID NO: 31196 - DNA, 40 bp, Artificial Sequence
  Description of Artificial Sequence: Synthetic primer
ttccagtgagggcagaaccaggctggcaggaggggaggac

SEQ ID NO: 31197 - DNA, 40 bp, Artificial Sequence
  Description of Artificial Sequence: Synthetic primer
ctggcctaactccctcagagctgtcgatcagaaagacaat

SEQ ID NO: 31198 - DNA, 40 bp, Artificial Sequence
  Description of Artificial Sequence: Synthetic primer
tatttcctgaaataaatgtttcaaatgcagaaacccagaa

SEQ ID NO: 31199 - DNA, 40 bp, Artificial Sequence
  Description of Artificial Sequence: Synthetic primer
taagccataagttcaacgtgtaaacttgttttcattaaag

SEQ ID NO: 31200 - DNA, 40 bp, Artificial Sequence
  Description of Artificial Sequence: Synthetic primer
ctcctccatctgggtctccagggcccgcttggacttctcc

SEQ ID NO: 31201 - DNA, 40 bp, Artificial Sequence
  Description of Artificial Sequence: Synthetic primer
acctccacacccaggcactaacagcactttctcccagcac

SEQ ID NO: 31202 - DNA, 40 bp, Artificial Sequence
  Description of Artificial Sequence: Synthetic primer
tccgtgccattgaagtcctcagtcttgccctcaccatcag

SEQ ID NO: 31203 - DNA, 40 bp, Artificial Sequence
  Description of Artificial Sequence: Synthetic primer
cttgaaggttatggacaggggcctgggctttcttccaagg

SEQ ID NO: 31204 - DNA, 40 bp, Artificial Sequence
  Description of Artificial Sequence: Synthetic primer
cattgtagtgtatgcgctgcccctgcagcccaacttgcag

SEQ ID NO: 31205 - DNA, 40 bp, Artificial Sequence
  Description of Artificial Sequence: Synthetic primer
atatggagcaaaactactgtagagcccacacctgggaaag

SEQ ID NO: 31206 - DNA, 40 bp, Artificial Sequence
  Description of Artificial Sequence: Synthetic primer
tctttgcaaaaagaacacttgtcaaccattttgtatagta

SEQ ID NO: 31207 - DNA, 40 bp, Artificial Sequence
  Description of Artificial Sequence: Synthetic primer
ataaccgagagccggggcccgagcggccgctgtcgggcgg

SEQ ID NO: 31208 - DNA, 40 bp, Artificial Sequence
  Description of Artificial Sequence: Synthetic primer
tttttaatgaaatgcaaattttctgtgatggggttctctc

SEQ ID NO: 31209 - DNA, 40 bp, Artificial Sequence
  Description of Artificial Sequence: Synthetic primer
tcattaaagtattcaggaactacctagaaaaaatataatg

SEQ ID NO: 31210 - DNA, 40 bp, Artificial Sequence
  Description of Artificial Sequence: Synthetic primer
gcgagccccctctttgggagagggtggccatggagtaagg

SEQ ID NO: 31211 - DNA, 40 bp, Artificial Sequence
  Description of Artificial Sequence: Synthetic primer
aggagacattgctatgaagatatctaatttaatactgaag

SEQ ID NO: 31212 - DNA, 40 bp, Artificial Sequence
  Description of Artificial Sequence: Synthetic primer
ttgtttttcaagcaacttaacgatatttgtttcctctttc

SEQ ID NO: 31213 - DNA, 40 bp, Artificial Sequence
  Description of Artificial Sequence: Synthetic primer
tttggccttctccccgaacactgtattccagttcctgctg

SEQ ID NO: 31214 - DNA, 40 bp, Artificial Sequence
  Description of Artificial Sequence: Synthetic primer
ccccctctcacgccacccccgcccccaccgggctgcaggt

SEQ ID NO: 31215 - DNA, 40 bp, Artificial Sequence
  Description of Artificial Sequence: Synthetic primer
attactccaccctctattagtgcacctcaaaaaattgtgg

SEQ ID NO: 31216 - DNA, 40 bp, Artificial Sequence
  Description of Artificial Sequence: Synthetic primer
accacagccaccccagcagaggccttatggatatgaccag

SEQ ID NO: 31217 - DNA, 40 bp, Artificial Sequence
  Description of Artificial Sequence: Synthetic primer
gaaagaagagaatctgttgtatcaagatattactgtagcc

SEQ ID NO: 31218 - DNA, 40 bp, Artificial Sequence
  Description of Artificial Sequence: Synthetic primer
tctatagaggtagatattatactgatgatccaccaagacc

SEQ ID NO: 31219 - DNA, 40 bp, Artificial Sequence
  Description of Artificial Sequence: Synthetic primer
ggttttgttctttttaaaaaatacatacttttttgaatgt

SEQ ID NO: 31220 - DNA, 40 bp, Artificial Sequence
  Description of Artificial Sequence: Synthetic primer
tggcatgtgtgaaagattcagggggtctgcagctgtttag

SEQ ID NO: 31221 - DNA, 40 bp, Artificial Sequence
  Description of Artificial Sequence: Synthetic primer
ggccacatttgaacattgtaaacttgctgggagcctgcac

SEQ ID NO: 31222 - DNA, 40 bp, Artificial Sequence
  Description of Artificial Sequence: Synthetic primer
ctaaaattagttttctttggttgaacaaatttacaattca

SEQ ID NO: 31223 - DNA, 40 bp, Artificial Sequence
  Description of Artificial Sequence: Synthetic primer
cgccggtgcgtccgtgcgaccggcagagcaggaccgcgcg

SEQ ID NO: 31224 - DNA, 40 bp, Artificial Sequence
  Description of Artificial Sequence: Synthetic primer
gccacactggcatacccactctcctcgctggaatgcttcg

SEQ ID NO: 31225 - DNA, 40 bp, Artificial Sequence
  Description of Artificial Sequence: Synthetic primer
ccattttgcaatttttttgttttccgttttaaagcaatgc

SEQ ID NO: 31226 - DNA, 40 bp, Artificial Sequence
  Description of Artificial Sequence: Synthetic primer
aggcaactcgcaaagatgagatggaagaaggcacgtgagc

SEQ ID NO: 31227 - DNA, 40 bp, Artificial Sequence
  Description of Artificial Sequence: Synthetic primer
actctcagtcctgttgctcccctaagtccagccagactgc

SEQ ID NO: 31228 - DNA, 40 bp, Artificial Sequence
  Description of Artificial Sequence: Synthetic primer
ccagtctctgaaccaacagccccgtgaaataacaaaccag

SEQ ID NO: 31229 - DNA, 40 bp, Artificial Sequence
  Description of Artificial Sequence: Synthetic primer
caacagaaagtggattcactactggcacattaacaagcac

SEQ ID NO: 31230 - DNA, 40 bp, Artificial Sequence
  Description of Artificial Sequence: Synthetic primer
gtggcaaaagacggcaggctcgccggacggctgtgattgt

SEQ ID NO: 31231 - DNA, 40 bp, Artificial Sequence
  Description of Artificial Sequence: Synthetic primer
gctctccaagtggcctggcagccccacgtcacgcagcagt

SEQ ID NO: 31232 - DNA, 40 bp, Artificial Sequence
  Description of Artificial Sequence: Synthetic primer
caccttgggcgagatgatgcggtgtttggcgctgttacac

SEQ ID NO: 31233 - DNA, 40 bp, Artificial Sequence
  Description of Artificial Sequence: Synthetic primer
gatgtgttgaaaacttcaatcacattacaatcttgaaaaa

SEQ ID NO: 31234 - DNA, 40 bp, Artificial Sequence
  Description of Artificial Sequence: Synthetic primer
aaattcaatcgggcagctcccttttccacaagcctctttg

SEQ ID NO: 31235 - DNA, 40 bp, Artificial Sequence
  Description of Artificial Sequence: Synthetic primer
tggctagtaaaatatgtcccaggtaataaagcatgctgac

SEQ ID NO: 31236 - DNA, 40 bp, Artificial Sequence
  Description of Artificial Sequence: Synthetic primer
ttgtgtcagcttcaaagagcaggacagttgaatcttcagg

SEQ ID NO: 31237 - DNA, 40 bp, Artificial Sequence
  Description of Artificial Sequence: Synthetic primer
aaagctctccagcttctctgtcatggtctctatggctgac

SEQ ID NO: 31238 - DNA, 40 bp, Artificial Sequence
  Description of Artificial Sequence: Synthetic primer
aacacgaaggaatgtcacagggccgctgagctgaaaacac

SEQ ID NO: 31239 - DNA, 40 bp, Artificial Sequence
  Description of Artificial Sequence: Synthetic primer
cacgtcccccagcgccgacaccaacaagcgcaagagagac

SEQ ID NO: 31240 - DNA, 40 bp, Artificial Sequence
  Description of Artificial Sequence: Synthetic primer
caacatctttgtgttgctttcaccaggctgagaccctacc

SEQ ID NO: 31241 - DNA, 40 bp, Artificial Sequence
  Description of Artificial Sequence: Synthetic primer
agaggaatcggtccacagccttccgggttgtgggtgtaag

SEQ ID NO: 31242 - DNA, 40 bp, Artificial Sequence
  Description of Artificial Sequence: Synthetic primer
atacatttccaggtcctgagcaatcttcaggtattccaac

SEQ ID NO: 31243 - DNA, 40 bp, Artificial Sequence
  Description of Artificial Sequence: Synthetic primer
ttcataaatctgagcgccattgtctgacatggaaatgacg

SEQ ID NO: 31244 - DNA, 40 bp, Artificial Sequence
  Description of Artificial Sequence: Synthetic primer
aagcctttttgaatgaaagctgagccggtgggcagtgcag

SEQ ID NO: 31245 - DNA, 40 bp, Artificial Sequence
  Description of Artificial Sequence: Synthetic primer
ggacgggctccgtggctggttcccggcgagctacgtgcag

SEQ ID NO: 31246 - DNA, 40 bp, Artificial Sequence
  Description of Artificial Sequence: Synthetic primer
gtcaggtcaaagaatatggccagaagagggcattctgcac

SEQ ID NO: 31247 - DNA, 40 bp, Artificial Sequence
  Description of Artificial Sequence: Synthetic primer
ggcatctgtgctgtaaagggaaagacagatgagactcctg

SEQ ID NO: 31248 - DNA, 40 bp, Artificial Sequence
  Description of Artificial Sequence: Synthetic primer
atagaagacagaataaatgcaaaaactaagtcacagagtg

SEQ ID NO: 31249 - DNA, 40 bp, Artificial Sequence
  Description of Artificial Sequence: Synthetic primer
gtctcgtgggagcacctgaacaccacgagaaatgatggag

SEQ ID NO: 31250 - DNA, 40 bp, Artificial Sequence
  Description of Artificial Sequence: Synthetic primer
ttgaagaacccaatttctagttctatcactggttaagctc

SEQ ID NO: 31251 - DNA, 40 bp, Artificial Sequence
  Description of Artificial Sequence: Synthetic primer
caaatctatgagattttccaaaaactaaacacaagtattc

SEQ ID NO: 31252 - DNA, 40 bp, Artificial Sequence
  Description of Artificial Sequence: Synthetic primer
caggcttatcatcagcttttctaccaagaaacacttcagc

SEQ ID NO: 31253 - DNA, 40 bp, Artificial Sequence
  Description of Artificial Sequence: Synthetic primer
tactcctggctcagaaacgcccataatcaacagagcaaat

SEQ ID NO: 31254 - DNA, 40 bp, Artificial Sequence
  Description of Artificial Sequence: Synthetic primer
aagagattctcactcgtgcacatgaaagggagtttggttc

SEQ ID NO: 31255 - DNA, 40 bp, Artificial Sequence
  Description of Artificial Sequence: Synthetic primer
cactcaaccagtcttccatttacccatcactaagcccaag

SEQ ID NO: 31256 - DNA, 40 bp, Artificial Sequence
  Description of Artificial Sequence: Synthetic primer
tcttgagggccatgttcttctgggcagcttcctcttccac

SEQ ID NO: 31257 - DNA, 40 bp, Artificial Sequence
  Description of Artificial Sequence: Synthetic primer
gatcgcaaaatcaaccagctttcggaggagaatggagacc

SEQ ID NO: 31258 - DNA, 40 bp, Artificial Sequence
  Description of Artificial Sequence: Synthetic primer
ttaggggaacagggcatcagagactgtgcttccaacaaac

SEQ ID NO: 31259 - DNA, 40 bp, Artificial Sequence
  Description of Artificial Sequence: Synthetic primer
atagggagattggagaaggaattagagaatgcaaatgacc

SEQ ID NO: 31260 - DNA, 40 bp, Artificial Sequence
  Description of Artificial Sequence: Synthetic primer
gcctcttcctgtgcctcgatggggtgggtgggagggcatc

SEQ ID NO: 31261 - DNA, 40 bp, Artificial Sequence
  Description of Artificial Sequence: Synthetic primer
ccttttgtcttcaaatacaacaggcctccactgacccatc

SEQ ID NO: 31262 - DNA, 40 bp, Artificial Sequence
  Description of Artificial Sequence: Synthetic primer
agacgttcaacgacttactggggagagaaagaaaaggaac

SEQ ID NO: 31263 - DNA, 40 bp, Artificial Sequence
  Description of Artificial Sequence: Synthetic primer
cagtttgttgagcaaatgctatactcattgacacaataac

SEQ ID NO: 31264 - DNA, 40 bp, Artificial Sequence
  Description of Artificial Sequence: Synthetic primer
tttctaaaacttcgatacgcattttaagtttcagattgtc

SEQ ID NO: 31265 - DNA, 40 bp, Artificial Sequence
  Description of Artificial Sequence: Synthetic primer
tgctgcaggggcagggcatgccgccccagtgctggaagcc

SEQ ID NO: 31266 - DNA, 40 bp, Artificial Sequence
  Description of Artificial Sequence: Synthetic primer
aatgcatgatctgtatggggcaatactattgcattttacg

SEQ ID NO: 31267 - DNA, 40 bp, Artificial Sequence
  Description of Artificial Sequence: Synthetic primer
tctgaaagtgctacagtgaccagtgctacgtttcctgcac

SEQ ID NO: 31268 - DNA, 40 bp, Artificial Sequence
  Description of Artificial Sequence: Synthetic primer
ctgctgctgcctcatctgagtaggtgtaagaggggaggag

SEQ ID NO: 31269 - DNA, 40 bp, Artificial Sequence
  Description of Artificial Sequence: Synthetic primer
tgacccagacctggctgtggtcaaacccacccggcccaac

SEQ ID NO: 31270 - DNA, 40 bp, Artificial Sequence
  Description of Artificial Sequence: Synthetic primer
accggagagtaccagtgaatctcactctcagagcaaaagc

SEQ ID NO: 31271 - DNA, 40 bp, Artificial Sequence
  Description of Artificial Sequence: Synthetic primer
tcctgacactgccattcctgcacaatttaccagcatgtcc

SEQ ID NO: 31272 - DNA, 40 bp, Artificial Sequence
  Description of Artificial Sequence: Synthetic primer
aacctgaagatgtgcctcctgagattttgtctaatgaaag

SEQ ID NO: 31273 - DNA, 40 bp, Artificial Sequence
  Description of Artificial Sequence: Synthetic primer
gggaccgctgcaagaaaaagttattcacgcgttattgtcg

SEQ ID NO: 31274 - DNA, 40 bp, Artificial Sequence
  Description of Artificial Sequence: Synthetic primer
ctggtgaaagttaaagacccaacagaatacactggacctg

SEQ ID NO: 31275 - DNA, 40 bp, Artificial Sequence
  Description of Artificial Sequence: Synthetic primer
tcttagagaagtttttctggataaaaagagccactgttcc

SEQ ID NO: 31276 - DNA, 40 bp, Artificial Sequence
  Description of Artificial Sequence: Synthetic primer
aggcctgggctcccccaccgtgcacaagatctcccgcttc

SEQ ID NO: 31277 - DNA, 40 bp, Artificial Sequence
  Description of Artificial Sequence: Synthetic primer
aaactgctttactcagtgattccttcctaggcctccaacc

SEQ ID NO: 31278 - DNA, 40 bp, Artificial Sequence
  Description of Artificial Sequence: Synthetic primer
gctgctttgcaggtcacctctgcatcgataatgtcatgtg

SEQ ID NO: 31279 - DNA, 40 bp, Artificial Sequence
  Description of Artificial Sequence: Synthetic primer
gttggctctcccgccagtgttgctcagtctcgctcaggac

SEQ ID NO: 31280 - DNA, 40 bp, Artificial Sequence
  Description of Artificial Sequence: Synthetic primer
ctaacagattatatcactcggctagaggcactgcaaagac

SEQ ID NO: 31281 - DNA, 40 bp, Artificial Sequence
  Description of Artificial Sequence: Synthetic primer
acatgttgaaaatacatactcctgttagccaagaagaaag

SEQ ID NO: 31282 - DNA, 40 bp, Artificial Sequence
  Description of Artificial Sequence: Synthetic primer
actgtcccaaggaccatacctctgcccagaagcacaaaag

SEQ ID NO: 31283 - DNA, 40 bp, Artificial Sequence
  Description of Artificial Sequence: Synthetic primer
acaccttgagcagcgccggcaggaggcacggaaggaactg

SEQ ID NO: 31284 - DNA, 40 bp, Artificial Sequence
  Description of Artificial Sequence: Synthetic primer
gctgtggagacaatgtctgcagccctgagaaagccctgtc

SEQ ID NO: 31285 - DNA, 40 bp, Artificial Sequence
  Description of Artificial Sequence: Synthetic primer
ctcggaagtaggacttgctccaacgggtctgctggtttag

SEQ ID NO: 31286 - DNA, 40 bp, Artificial Sequence
  Description of Artificial Sequence: Synthetic primer
atacttcatcttcagaatccaaatcataatcaggctgttc

SEQ ID NO: 31287 - DNA, 40 bp, Artificial Sequence
  Description of Artificial Sequence: Synthetic primer
tttaagaactctttgatcttttggcccttttaatggtgag

SEQ ID NO: 31288 - DNA, 40 bp, Artificial Sequence
  Description of Artificial Sequence: Synthetic primer
acgctctcaataggattctgtatttggtcccaatttcctc

SEQ ID NO: 31289 - DNA, 40 bp, Artificial Sequence
  Description of Artificial Sequence: Synthetic primer
tgtcagcccatggaagccaagctaactcgccctcaactcc

SEQ ID NO: 31290 - DNA, 40 bp, Artificial Sequence
  Description of Artificial Sequence: Synthetic primer
cttcgcccacagcttcatcgagctcaaggtctggctgctg

SEQ ID NO: 31291 - DNA, 40 bp, Artificial Sequence
  Description of Artificial Sequence: Synthetic primer
gtagctggctggctaaatgaactggttccaaacaatcctc

SEQ ID NO: 31292 - DNA, 40 bp, Artificial Sequence
  Description of Artificial Sequence: Synthetic primer
tcttttggaaggttttcttctccaaattcaagtttcatac

SEQ ID NO: 31293 - DNA, 40 bp, Artificial Sequence
  Description of Artificial Sequence: Synthetic primer
ttcctgtcttgcagacagagacccttggctaccactgtgc

SEQ ID NO: 31294 - DNA, 40 bp, Artificial Sequence
  Description of Artificial Sequence: Synthetic primer
gtgggaatattcctcctgacttatttgctagaatgacagc

SEQ ID NO: 31295 - DNA, 40 bp, Artificial Sequence
  Description of Artificial Sequence: Synthetic primer
ccacttttaccacatggttttctcccactaggcagttacg

SEQ ID NO: 31296 - DNA, 40 bp, Artificial Sequence
  Description of Artificial Sequence: Synthetic primer
ggactggaaaacccactctttcctaaggaaaggtttcaag

SEQ ID NO: 31297 - DNA, 40 bp, Artificial Sequence
  Description of Artificial Sequence: Synthetic primer
gttaggagaatgccgacagatgtcctcttcgagtcaaatc

SEQ ID NO: 31298 - DNA, 40 bp, Artificial Sequence
  Description of Artificial Sequence: Synthetic primer
acaatctactaatgttgtgtgatttgtgttatactggttg

SEQ ID NO: 31299 - DNA, 40 bp, Artificial Sequence
  Description of Artificial Sequence: Synthetic primer
ccagcgacgggtcgctctcgtggtggcggaagtcaccgtc

SEQ ID NO: 31300 - DNA, 40 bp, Artificial Sequence
  Description of Artificial Sequence: Synthetic primer
agcatctgccagatctgtggcttcaatcaggctgaggaga

SEQ ID NO: 31301 - DNA, 40 bp, Artificial Sequence
  Description of Artificial Sequence: Synthetic primer
gcagggagttggcagcagggccagcaatgaggcggatcac

SEQ ID NO: 31302 - DNA, 40 bp, Artificial Sequence
  Description of Artificial Sequence: Synthetic primer
tatagcctggccccgcccccggcccccaggggggctgtgc

SEQ ID NO: 31303 - DNA, 40 bp, Artificial Sequence
  Description of Artificial Sequence: Synthetic primer
tgatttaccgtaggagtaaaggtcagaaaaatgtgaagtc

SEQ ID NO: 31304 - DNA, 40 bp, Artificial Sequence
  Description of Artificial Sequence: Synthetic primer
cccctgatgcaggtaccacgtctgcatcgaagacacgcag

SEQ ID NO: 31305 - DNA, 40 bp, Artificial Sequence
  Description of Artificial Sequence: Synthetic primer
gggattacttcagtgaccaagacccacgtgtcagaacagc

SEQ ID NO: 31306 - DNA, 40 bp, Artificial Sequence
  Description of Artificial Sequence: Synthetic primer
cgtaaaactgagaggaggaccatgggcaggggagctgaag

SEQ ID NO: 31307 - DNA, 40 bp, Artificial Sequence
  Description of Artificial Sequence: Synthetic primer
ccgtatgtatttatggcacaagcaggtgttgtctaagcag

SEQ ID NO: 31308 - DNA, 40 bp, Artificial Sequence
  Description of Artificial Sequence: Synthetic primer
ctcgcaggaccccctctgtacatgttcatggcccaggagt

SEQ ID NO: 31309 - DNA, 40 bp, Artificial Sequence
  Description of Artificial Sequence: Synthetic primer
tcgcagccgccgcgcggcttttgtagcgaacgcggaggcc

SEQ ID NO: 31310 - DNA, 40 bp, Artificial Sequence
  Description of Artificial Sequence: Synthetic primer
ggaggtgtacgagggcgtgtggaagaaatacagcctgacg

SEQ ID NO: 31311 - DNA, 40 bp, Artificial Sequence
  Description of Artificial Sequence: Synthetic primer
agctggcccagcccctcctctttccctcaaggctgcagga

SEQ ID NO: 31312 - DNA, 40 bp, Artificial Sequence
  Description of Artificial Sequence: Synthetic primer
cgtgccatgctgggcaaaacgaggaggggtttctctctcc

SEQ ID NO: 31313 - DNA, 40 bp, Artificial Sequence
  Description of Artificial Sequence: Synthetic primer
ctacgttgctgacagagctcgatgtggctgaacgaaaagg

SEQ ID NO: 31314 - DNA, 40 bp, Artificial Sequence
  Description of Artificial Sequence: Synthetic primer
tgggttactcctgccaactcgacgccggccgccatgacac

SEQ ID NO: 31315 - DNA, 40 bp, Artificial Sequence
  Description of Artificial Sequence: Synthetic primer
acttcagaaaagagtgatggcactgctgaggcgcattgag

SEQ ID NO: 31316 - DNA, 40 bp, Artificial Sequence
  Description of Artificial Sequence: Synthetic primer
acacaataacacccattcctgggaccgtggggatttaggg

SEQ ID NO: 31317 - DNA, 40 bp, Artificial Sequence
  Description of Artificial Sequence: Synthetic primer
ctgaccttcgccgccgaagctgtagccgaggctgcggccg

SEQ ID NO: 31318 - DNA, 40 bp, Artificial Sequence
  Description of Artificial Sequence: Synthetic primer
atgggctgttcaccgtgtgccatgacaacagcaggactgg

SEQ ID NO: 31319 - DNA, 40 bp, Artificial Sequence
  Description of Artificial Sequence: Synthetic primer
catcaccctgtataacatcgtgtacacctccctgccagtc

SEQ ID NO: 31320 - DNA, 40 bp, Artificial Sequence
  Description of Artificial Sequence: Synthetic primer
ttagcagcaacaatatttcagagctccaaactgcatttcc

SEQ ID NO: 31321 - DNA, 40 bp, Artificial Sequence
  Description of Artificial Sequence: Synthetic primer
atttcgatctctgtaagttattctccggaactgctcaatg

SEQ ID NO: 31322 - DNA, 40 bp, Artificial Sequence
  Description of Artificial Sequence: Synthetic primer
caaagtttattaccacattcacagcttgtatatcaatacc

SEQ ID NO: 31323 - DNA, 40 bp, Artificial Sequence
  Description of Artificial Sequence: Synthetic primer
ctatgcagactgcacaatgatcaaagtctgggtcagtttc

SEQ ID NO: 31324 - DNA, 40 bp, Artificial Sequence
  Description of Artificial Sequence: Synthetic primer
cacacacccacgacacgcaacacagacgcagacacaagac

SEQ ID NO: 31325 - DNA, 40 bp, Artificial Sequence
  Description of Artificial Sequence: Synthetic primer
tgacacaatggcaaagcttcgagaaatgctgcaccaaagc

SEQ ID NO: 31326 - DNA, 40 bp, Artificial Sequence
  Description of Artificial Sequence: Synthetic primer
ggtgggggctaaggggctaggtttggtcccatggctacat

SEQ ID NO: 31327 - DNA, 40 bp, Artificial Sequence
  Description of Artificial Sequence: Synthetic primer
catcagattcctgtttgatcacatcctgcagatcttctac

SEQ ID NO: 31328 - DNA, 40 bp, Artificial Sequence
  Description of Artificial Sequence: Synthetic primer
aataaatagtgactcccatagtaaaagataaaatttcaag

SEQ ID NO: 31329 - DNA, 40 bp, Artificial Sequence
  Description of Artificial Sequence: Synthetic primer
tattaagtggacagcaccagagagtcttgcctacaatacc

SEQ ID NO: 31330 - DNA, 40 bp, Artificial Sequence
  Description of Artificial Sequence: Synthetic primer
caacttcctgtcctactaccgcctcacacgcttcctctcc

SEQ ID NO: 31331 - DNA, 40 bp, Artificial Sequence
  Description of Artificial Sequence: Synthetic primer
gttccaagctatagattgtgcctctgaaaaaggcatggac

SEQ ID NO: 31332 - DNA, 40 bp, Artificial Sequence
  Description of Artificial Sequence: Synthetic primer
gttctgctcctttgagactcggcgccacctctgcatggtc

SEQ ID NO: 31333 - DNA, 40 bp, Artificial Sequence
  Description of Artificial Sequence: Synthetic primer
ccaaaccctagagctagcagttcccattcaggcaaacaag

SEQ ID NO: 31334 - DNA, 40 bp, Artificial Sequence
  Description of Artificial Sequence: Synthetic primer
cttattcatcaacagcagtttcagcagttgttaaattctc

SEQ ID NO: 31335 - DNA, 40 bp, Artificial Sequence
  Description of Artificial Sequence: Synthetic primer
ggacttccagggcccggaggcgggctgcctgcacccagcg

SEQ ID NO: 31336 - DNA, 40 bp, Artificial Sequence
  Description of Artificial Sequence: Synthetic primer
cggtgccaggcgatagtgggtaatacggggatatatctgg

SEQ ID NO: 31337 - DNA, 40 bp, Artificial Sequence
  Description of Artificial Sequence: Synthetic primer
tcccccagcctgccaaattttgatccttcccctcttttgg

SEQ ID NO: 31338 - DNA, 40 bp, Artificial Sequence
  Description of Artificial Sequence: Synthetic primer
ggagagagctccagcaataggggccatgtcgccgtagccc

SEQ ID NO: 31339 - DNA, 40 bp, Artificial Sequence
  Description of Artificial Sequence: Synthetic primer
agtgaagcattcactccaaaggagggttctccttacaaag

SEQ ID NO: 31340 - DNA, 40 bp, Artificial Sequence
  Description of Artificial Sequence: Synthetic primer
cgcaacctagttggcagaggaagctcaccccgaggaagtc

SEQ ID NO: 31341 - DNA, 40 bp, Artificial Sequence
  Description of Artificial Sequence: Synthetic primer
gctttctcactaaaatgtggtgaaaagaggatagattaaa

SEQ ID NO: 31342 - DNA, 40 bp, Artificial Sequence
  Description of Artificial Sequence: Synthetic primer
agtaactgatttgcctgggccctgggtcttgggattctgg

SEQ ID NO: 31343 - DNA, 40 bp, Artificial Sequence
  Description of Artificial Sequence: Synthetic primer
gtctcccccaccgatcccacccacccccctcttcccgctc

SEQ ID NO: 31344 - DNA, 40 bp, Artificial Sequence
  Description of Artificial Sequence: Synthetic primer
agcacaaatgatccttatgtggcttttagaaggcgtactg

SEQ ID NO: 31345 - DNA, 40 bp, Artificial Sequence
  Description of Artificial Sequence: Synthetic primer
gagattgtccagggacaaggagacctggccggacctctgc

SEQ ID NO: 31346 - DNA, 40 bp, Artificial Sequence
  Description of Artificial Sequence: Synthetic primer
gactgggaatcacttatttttctggctaggcttatacctc

SEQ ID NO: 31347 - DNA, 40 bp, Artificial Sequence
  Description of Artificial Sequence: Synthetic primer
tgagctgtgaaggacgatatgaacgaggtagggccgagag

SEQ ID NO: 31348 - DNA, 40 bp, Artificial Sequence
  Description of Artificial Sequence: Synthetic primer
cctttggagggagttttaaagtctttttccagtcatcacc

SEQ ID NO: 31349 - DNA, 40 bp, Artificial Sequence
  Description of Artificial Sequence: Synthetic primer
tctttcaagatttcttcttgcttgattttgtgctgctcca

SEQ ID NO: 31350 - DNA, 40 bp, Artificial Sequence
  Description of Artificial Sequence: Synthetic primer
aaactgccactgccactgtggttaaatcacttggtgtatg

SEQ ID NO: 31351 - DNA, 40 bp, Artificial Sequence
  Description of Artificial Sequence: Synthetic primer
gcctggtttcttcttcaagactctgaacaattgctttaac

SEQ ID NO: 31352 - DNA, 40 bp, Artificial Sequence
  Description of Artificial Sequence: Synthetic primer
ctcagttttggtgcccgagacaggcagtgatcgcaacttc

SEQ ID NO: 31353 - DNA, 40 bp, Artificial Sequence
  Description of Artificial Sequence: Synthetic primer
aggagaggaaaaaggaagagagcactgcagccagtgaaac

SEQ ID NO: 31354 - DNA, 40 bp, Artificial Sequence
  Description of Artificial Sequence: Synthetic primer
aggttcatcgtacacgtaccagtctcaatcccacagaaac

SEQ ID NO: 31355 - DNA, 40 bp, Artificial Sequence
  Description of Artificial Sequence: Synthetic primer
accattgagctcacctgtgcactttgcaaacttcgaagtg

SEQ ID NO: 31356 - DNA, 40 bp, Artificial Sequence
  Description of Artificial Sequence: Synthetic primer
tgtgttctcagcctctctaattcagcttcttgtgattcag

SEQ ID NO: 31357 - DNA, 40 bp, Artificial Sequence
  Description of Artificial Sequence: Synthetic primer
atggtacttgtcattgctgatgaggttgtggtacgtcgtc

SEQ ID NO: 31358 - DNA, 40 bp, Artificial Sequence
  Description of Artificial Sequence: Synthetic primer
acaactaagacagatgacccccaattgaaaagagaaataa

SEQ ID NO: 31359 - DNA, 40 bp, Artificial Sequence
  Description of Artificial Sequence: Synthetic primer
cataggctcctcttcctctctttcattcaagtcttcaaac

SEQ ID NO: 31360 - DNA, 40 bp, Artificial Sequence
  Description of Artificial Sequence: Synthetic primer
ttttgtaaaagttgaagatttaccactgaaactgacaata

SEQ ID NO: 31361 - DNA, 40 bp, Artificial Sequence
  Description of Artificial Sequence: Synthetic primer
ggttcggtatggaaaggattctgccatctctccactgtcc

SEQ ID NO: 31362 - DNA, 40 bp, Artificial Sequence
  Description of Artificial Sequence: Synthetic primer
atgtggataagcaggctctagtactggcgctggcaccttg

SEQ ID NO: 31363 - DNA, 40 bp, Artificial Sequence
  Description of Artificial Sequence: Synthetic primer
aaaatgatatgcaataagaaattggaaaaagggagcaaag

SEQ ID NO: 31364 - DNA, 40 bp, Artificial Sequence
  Description of Artificial Sequence: Synthetic primer
cccgtcgtccagggtgctgttgagcaagggcagcgggtag

SEQ ID NO: 31365 - DNA, 40 bp, Artificial Sequence
  Description of Artificial Sequence: Synthetic primer
tcctttggaagttatcccaaccctgcttttctcaaaagtg

SEQ ID NO: 31366 - DNA, 40 bp, Artificial Sequence
  Description of Artificial Sequence: Synthetic primer
gctgatgggccagatacatcagctcagatccgaattacag

SEQ ID NO: 31367 - DNA, 40 bp, Artificial Sequence
  Description of Artificial Sequence: Synthetic primer
ctccagaccttctagaaggaacgaaagaggtctcgtttcc

SEQ ID NO: 31368 - DNA, 40 bp, Artificial Sequence
  Description of Artificial Sequence: Synthetic primer
agaaatcagctactcctgccaattcagattgaagttctcc

SEQ ID NO: 31369 - DNA, 40 bp, Artificial Sequence
  Description of Artificial Sequence: Synthetic primer
tctgaggacctactggattatgggcctttcagagatgtgc

SEQ ID NO: 31370 - DNA, 40 bp, Artificial Sequence
  Description of Artificial Sequence: Synthetic primer
tccagtaagaacatctccattccccaagaatgctaaacac

SEQ ID NO: 31371 - DNA, 40 bp, Artificial Sequence
  Description of Artificial Sequence: Synthetic primer
gctccccgcctcccgcactccgctcgctcccaccccttcc

SEQ ID NO: 31372 - DNA, 40 bp, Artificial Sequence
  Description of Artificial Sequence: Synthetic primer
acaaagatccttttgccagtagcagaagggaggaaaacag

SEQ ID NO: 31373 - DNA, 40 bp, Artificial Sequence
  Description of Artificial Sequence: Synthetic primer
aaacacaccaagcttttgaaaccatgttccatgactccag

SEQ ID NO: 31374 - DNA, 40 bp, Artificial Sequence
  Description of Artificial Sequence: Synthetic primer
cttctctgatggggaaaagccactgctgccctccccacac

SEQ ID NO: 31375 - DNA, 40 bp, Artificial Sequence
  Description of Artificial Sequence: Synthetic primer
aaatgatatagctttaggtggcttctcaagtttcatgtgg

SEQ ID NO: 31376 - DNA, 40 bp, Artificial Sequence
  Description of Artificial Sequence: Synthetic primer
taaaaataaacaaaaaaaccatgacctaatttcagaaatg

SEQ ID NO: 31377 - DNA, 40 bp, Artificial Sequence
  Description of Artificial Sequence: Synthetic primer
acctgccaggcaggcactggtgaagggccttgggcctatc

SEQ ID NO: 31378 - DNA, 40 bp, Artificial Sequence
  Description of Artificial Sequence: Synthetic primer
ttcccatatccataggcgttttaatgatcttatagtaatc

SEQ ID NO: 31379 - DNA, 40 bp, Artificial Sequence
  Description of Artificial Sequence: Synthetic primer
tctgaagaaatcttacgcgtggtgccacagcaagaccaag

SEQ ID NO: 31380 - DNA, 40 bp, Artificial Sequence
  Description of Artificial Sequence: Synthetic primer
atcagagataacctcgagttcttggtgtagaaattatgtg

SEQ ID NO: 31381 - DNA, 40 bp, Artificial Sequence
  Description of Artificial Sequence: Synthetic primer
cacgtacatgaagtgcagctgcgccggcgggggcggctcc

SEQ ID NO: 31382 - DNA, 40 bp, Artificial Sequence
  Description of Artificial Sequence: Synthetic primer
ttgtgctttcaattcctggaaacgttttgcagcttcttcc

SEQ ID NO: 31383 - DNA, 40 bp, Artificial Sequence
  Description of Artificial Sequence: Synthetic primer
aatgtgtatgggctcaaggagatcgtttatttgccgaatg

SEQ ID NO: 31384 - DNA, 40 bp, Artificial Sequence
  Description of Artificial Sequence: Synthetic primer
gtacaaactttagtttttgattataaggacttcactgcaa

SEQ ID NO: 31385 - DNA, 40 bp, Artificial Sequence
  Description of Artificial Sequence: Synthetic primer
aggacccagagtcattacctttccggcagcctgtagatcc

SEQ ID NO: 31386 - DNA, 40 bp, Artificial Sequence
  Description of Artificial Sequence: Synthetic primer
gagatctaccagacaaaactgggacctgatgaccccaacg

SEQ ID NO: 31387 - DNA, 40 bp, Artificial Sequence
  Description of Artificial Sequence: Synthetic primer
tttctctccacaaccagggacttctcctgaaaaagtgaac

SEQ ID NO: 31388 - DNA, 40 bp, Artificial Sequence
  Description of Artificial Sequence: Synthetic primer
aggcagcagagtgagtggatctggcagctgcatcctagag

SEQ ID NO: 31389 - DNA, 40 bp, Artificial Sequence
  Description of Artificial Sequence: Synthetic primer
gataataaaaaattgaggtgatgttactcaaccacagtgc

SEQ ID NO: 31390 - DNA, 40 bp, Artificial Sequence
  Description of Artificial Sequence: Synthetic primer
atgcagtacactgctgaattagattgtattccataaagac

SEQ ID NO: 31391 - DNA, 40 bp, Artificial Sequence
  Description of Artificial Sequence: Synthetic primer
taacatgaattatgacaaactcagccgagccctcagatac

SEQ ID NO: 31392 - DNA, 40 bp, Artificial Sequence
  Description of Artificial Sequence: Synthetic primer
ctcatatttgaggaccatgaaacattgtaggtatatatgg

SEQ ID NO: 31393 - DNA, 40 bp, Artificial Sequence
  Description of Artificial Sequence: Synthetic primer
atccagaatggaaacctccatgaatccgactctgagagtg

SEQ ID NO: 31394 - DNA, 40 bp, Artificial Sequence
  Description of Artificial Sequence: Synthetic primer
gttatggtacaaagcggagacataaatagatggggcaagc

SEQ ID NO: 31395 - DNA, 40 bp, Artificial Sequence
  Description of Artificial Sequence: Synthetic primer
tggaaccaaggccccctccacgcaaacaccctccctcctg

SEQ ID NO: 31396 - DNA, 40 bp, Artificial Sequence
  Description of Artificial Sequence: Synthetic primer
cgaccagatcattgtggccctcaaatccgaggaggacagc

SEQ ID NO: 31397 - DNA, 40 bp, Artificial Sequence
  Description of Artificial Sequence: Synthetic primer
ggagaccgagagcagctccagcgagagtgagggcagcaag

SEQ ID NO: 31398 - DNA, 40 bp, Artificial Sequence
  Description of Artificial Sequence: Synthetic primer
cacgctctgaccactgcccacaacggtaagtttcaagaag

SEQ ID NO: 31399 - DNA, 40 bp, Artificial Sequence
  Description of Artificial Sequence: Synthetic primer
caaatctcttcctttcacatggtgttggttgaatactatc

SEQ ID NO: 31400 - DNA, 40 bp, Artificial Sequence
  Description of Artificial Sequence: Synthetic primer
gtcgccgcccagacgtgtaccgacgcgtgcacccgccgtc

SEQ ID NO: 31401 - DNA, 40 bp, Artificial Sequence
  Description of Artificial Sequence: Synthetic primer
agctgttccaccgagaagcctgagctgctgttcccattgc

SEQ ID NO: 31402 - DNA, 40 bp, Artificial Sequence
  Description of Artificial Sequence: Synthetic primer
ggtgcggcccccgcccctgaagaagacctttgactctgtg

SEQ ID NO: 31403 - DNA, 40 bp, Artificial Sequence
  Description of Artificial Sequence: Synthetic primer
atccatattgcacaactctactgttgcaaagcttccttgg

SEQ ID NO: 31404 - DNA, 40 bp, Artificial Sequence
  Description of Artificial Sequence: Synthetic primer
cgtagtggcaggggtcggggtcgcactcatcgatgtccac

SEQ ID NO: 31405 - DNA, 40 bp, Artificial Sequence
  Description of Artificial Sequence: Synthetic primer
gaataacgaaaatgccagattacttacttttcagacatgg

SEQ ID NO: 31406 - DNA, 40 bp, Artificial Sequence
  Description of Artificial Sequence: Synthetic primer
cctgttcttagagcccctgacaaaggcagcacttatttcc

SEQ ID NO: 31407 - DNA, 40 bp, Artificial Sequence
  Description of Artificial Sequence: Synthetic primer
gatgaggggttaatttatcagtacatgagccaaaaactgc

SEQ ID NO: 31408 - DNA, 40 bp, Artificial Sequence
  Description of Artificial Sequence: Synthetic primer
acaactatggcatcgtgcaccgcgacctcaagcctgacaa

SEQ ID NO: 31409 - DNA, 40 bp, Artificial Sequence
  Description of Artificial Sequence: Synthetic primer
tccaagtttgtatctgcaactggacctgtcagcgaacttg

SEQ ID NO: 31410 - DNA, 40 bp, Artificial Sequence
  Description of Artificial Sequence: Synthetic primer
caagtgggccctgcacgagctcaaaggacactatgcaatc

SEQ ID NO: 31411 - DNA, 40 bp, Artificial Sequence
  Description of Artificial Sequence: Synthetic primer
ccccctgacggccgagaagctgtgcatctacaccgacaac

SEQ ID NO: 31412 - DNA, 40 bp, Artificial Sequence
  Description of Artificial Sequence: Synthetic primer
aatcacatctaatatttgatactacatgattcaatacagc

SEQ ID NO: 31413 - DNA, 40 bp, Artificial Sequence
  Description of Artificial Sequence: Synthetic primer
aaagctccagcaaagccccccgggccccacccgaagcccc

SEQ ID NO: 31414 - DNA, 40 bp, Artificial Sequence
  Description of Artificial Sequence: Synthetic primer
cagaatgaagcctgccttgtttaatgtgttgtgtgaaatc

SEQ ID NO: 31415 - DNA, 40 bp, Artificial Sequence
  Description of Artificial Sequence: Synthetic primer
taatgaatctttggttggtgtctgtctgtgtgatgttttc

SEQ ID NO: 31416 - DNA, 40 bp, Artificial Sequence
  Description of Artificial Sequence: Synthetic primer
ataaaattgttgctttcaaaggcatggacatacttaatgg

SEQ ID NO: 31417 - DNA, 40 bp, Artificial Sequence
  Description of Artificial Sequence: Synthetic primer
ataaaagtgatacttagattttgcaggcattcaataagtg

SEQ ID NO: 31418 - DNA, 40 bp, Artificial Sequence
  Description of Artificial Sequence: Synthetic primer
tgtggcaagaagttcagcctcaagcatcagctggagacgc

SEQ ID NO: 31419 - DNA, 40 bp, Artificial Sequence
  Description of Artificial Sequence: Synthetic primer
aaaatgatttttttaaaaccaataaatcatcaattattag

SEQ ID NO: 31420 - DNA, 40 bp, Artificial Sequence
  Description of Artificial Sequence: Synthetic primer
ttcagccaagcggcctaaactctcatctccggccctctcg

SEQ ID NO: 31421 - DNA, 40 bp, Artificial Sequence
  Description of Artificial Sequence: Synthetic primer
atgtagagtcttgcaacagtgaactcttcatctatcatgc

SEQ ID NO: 31422 - DNA, 40 bp, Artificial Sequence
  Description of Artificial Sequence: Synthetic primer
actaagaagtggcactaccctcattttacaagataccatc

SEQ ID NO: 31423 - DNA, 40 bp, Artificial Sequence
  Description of Artificial Sequence: Synthetic primer
tggaagttcacagggtgcggaggcatcattctctactttc

SEQ ID NO: 31424 - DNA, 40 bp, Artificial Sequence
  Description of Artificial Sequence: Synthetic primer
tcatagggtttctctccagtatgagtcctaccatgcactc

SEQ ID NO: 31425 - DNA, 40 bp, Artificial Sequence
  Description of Artificial Sequence: Synthetic primer
caacctgaaacttaacaccagtggacacttccgttgttgg

SEQ ID NO: 31426 - DNA, 40 bp, Artificial Sequence; identical to SEQ ID NO: 20764
  Description of Artificial Sequence: Synthetic primer

SEQ ID NO: 31427 - DNA, 40 bp, Artificial Sequence
  Description of Artificial Sequence: Synthetic primer
gtgagtggataagccctctcaatggttatcacgccgattc

SEQ ID NO: 31428 - DNA, 40 bp, Artificial Sequence
  Description of Artificial Sequence: Synthetic primer
ggcttccgaatgccccagtttgactggtctgtgggagttc

SEQ ID NO: 31429 - DNA, 40 bp, Artificial Sequence
  Description of Artificial Sequence: Synthetic primer
ctgcaggggctgggggcacacggggccagcaccacctcac

SEQ ID NO: 31430 - DNA, 40 bp, Artificial Sequence
  Description of Artificial Sequence: Synthetic primer
agttcccgaccagggcccatctgtgggggaattccttttg

SEQ ID NO: 31431 - DNA, 40 bp, Artificial Sequence
  Description of Artificial Sequence: Synthetic primer
atttttaataactggaagcacttaatgattattttgtttg

SEQ ID NO: 31432 - DNA, 40 bp, Artificial Sequence
  Description of Artificial Sequence: Synthetic primer
ggcaaaacttgcttccctggccagcctctgggtcatcatc

SEQ ID NO: 31433 - DNA, 40 bp, Artificial Sequence
  Description of Artificial Sequence: Synthetic primer
caaggagcaaccccaacttggacccctactacccgctcag

SEQ ID NO: 31434 - DNA, 40 bp, Artificial Sequence
  Description of Artificial Sequence: Synthetic primer
aggaagatgtacacctaaggtatcaagtggttaaaacagc

SEQ ID NO: 31435 - DNA, 40 bp, Artificial Sequence
  Description of Artificial Sequence: Synthetic primer
gcattaatagacataacctcattagcagaggtggagtttc

SEQ ID NO: 31436 - DNA, 40 bp, Artificial Sequence
  Description of Artificial Sequence: Synthetic primer
acagtattttatctcagggagacatctttatgaactcaac

SEQ ID NO: 31437 - DNA, 40 bp, Artificial Sequence
  Description of Artificial Sequence: Synthetic primer
ttgctgcctggtatttgttcagtttccttgtatatctcag

SEQ ID NO: 31438 - DNA, 40 bp, Artificial Sequence
  Description of Artificial Sequence: Synthetic primer
acagaaagttctgagaaggtgggaaaggaaacctctgaac

SEQ ID NO: 31439 - DNA, 40 bp, Artificial Sequence
  Description of Artificial Sequence: Synthetic primer
tcttggtatcgggtctaattccagttactgcttcattctc

SEQ ID NO: 31440 - DNA, 40 bp, Artificial Sequence
  Description of Artificial Sequence: Synthetic primer
ccagaactaagggtatgaaggacctgtattggggtcgatg

SEQ ID NO: 31441 - DNA, 40 bp, Artificial Sequence
  Description of Artificial Sequence: Synthetic primer
ttctgtgccaagaaagttcatctttatgtttttctaatac

SEQ ID NO: 31442 - DNA, 40 bp, Artificial Sequence
  Description of Artificial Sequence: Synthetic primer
gagtatgtgccagaaattgtgaactttgtccagaagattg

SEQ ID NO: 31443 - DNA, 40 bp, Artificial Sequence
  Description of Artificial Sequence: Synthetic primer
ccagacacaaactttgagggaccccagggctcctcggctc

SEQ ID NO: 31444 - DNA, 40 bp, Artificial Sequence
  Description of Artificial Sequence: Synthetic primer
gaagtttggtaaagaccgagttagtctatctctctttgcc

SEQ ID NO: 31445 - DNA, 40 bp, Artificial Sequence
  Description of Artificial Sequence: Synthetic primer
ttggggtgaacccgacatttgacgcggtgggtccccagac

SEQ ID NO: 31446 - DNA, 40 bp, Artificial Sequence
  Description of Artificial Sequence: Synthetic primer
cttctcgcataccacgaccacacggctctcaaagcagctc

SEQ ID NO: 31447 - DNA, 40 bp, Artificial Sequence
  Description of Artificial Sequence: Synthetic primer
cctccagctccaactgcagtggcaaggtctggggattgag

SEQ ID NO: 31448 - DNA, 40 bp, Artificial Sequence
  Description of Artificial Sequence: Synthetic primer
gactagccagaattctaccctggaaaagtgttagggattc

SEQ ID NO: 31449 - DNA, 40 bp, Artificial Sequence
  Description of Artificial Sequence: Synthetic primer
ccagacccttccacctccgagcttgagccagcaagtcttc

SEQ ID NO: 31450 - DNA, 40 bp, Artificial Sequence
  Description of Artificial Sequence: Synthetic primer
gcatcagccttagcacttttcaggtctctccgggcatctg

SEQ ID NO: 31451 - DNA, 40 bp, Artificial Sequence
  Description of Artificial Sequence: Synthetic primer
aaaccacagaagaaagtttgaggaactactacgaacaatg

SEQ ID NO: 31452 - DNA, 40 bp, Artificial Sequence
  Description of Artificial Sequence: Synthetic primer
ggagggtctcttctccggctcactgttccagcatttcacc

SEQ ID NO: 31453 - DNA, 40 bp, Artificial Sequence
  Description of Artificial Sequence: Synthetic primer
aagacaagcccaaggtgaagacgaaaggacggccccgggc

SEQ ID NO: 31454 - DNA, 40 bp, Artificial Sequence
  Description of Artificial Sequence: Synthetic primer
gagaacggactgggcggacgtttcttaagaagaattctag

SEQ ID NO: 31455 - DNA, 40 bp, Artificial Sequence
  Description of Artificial Sequence: Synthetic primer
gacagtgacaatcaagccatactctctgagcagtggagag

SEQ ID NO: 31456 - DNA, 40 bp, Artificial Sequence
  Description of Artificial Sequence: Synthetic primer
tcaggggagaccaagaacaggttgaataaggcgcttctgg

SEQ ID NO: 31457 - DNA, 40 bp, Artificial Sequence
  Description of Artificial Sequence: Synthetic primer
acgcttatcttggctgatgagattattcatggtgggaagg

SEQ ID NO: 31458 - DNA, 40 bp, Artificial Sequence
  Description of Artificial Sequence: Synthetic primer
cgacttatggctgcaaaacagaaacttagacagttacaag

SEQ ID NO: 31459 - DNA, 40 bp, Artificial Sequence
  Description of Artificial Sequence: Synthetic primer
gccggcggggactgggacccccaagagccggagggtcccc

SEQ ID NO: 31460 - DNA, 40 bp, Artificial Sequence
  Description of Artificial Sequence: Synthetic primer
gcgacccgctgcggccgtcacagccgcccggcgggagctg

SEQ ID NO: 31461 - DNA, 40 bp, Artificial Sequence
  Description of Artificial Sequence: Synthetic primer
acactttcctgggagcggcggccacggaggcaccatgaag

SEQ ID NO: 31462 - DNA, 40 bp, Artificial Sequence
  Description of Artificial Sequence: Synthetic primer
ccgtgcggccaccgcgccccccaagcttgcctccttcttg

SEQ ID NO: 31463 - DNA, 40 bp, Artificial Sequence
  Description of Artificial Sequence: Synthetic primer
ggagtcaccaagcctccggagccggccactggaggtccgc

SEQ ID NO: 31464 - DNA, 40 bp, Artificial Sequence
  Description of Artificial Sequence: Synthetic primer
ggtgtgatgttgagtaacaagttggtacagttactttagc

SEQ ID NO: 31465 - DNA, 40 bp, Artificial Sequence
  Description of Artificial Sequence: Synthetic primer
tctctggaatgaccatttacaaaagtaaataagggatatt

SEQ ID NO: 31466 - DNA, 40 bp, Artificial Sequence
  Description of Artificial Sequence: Synthetic primer
tgcccccacgggtcattccctgaagtctctggacctagtg

SEQ ID NO: 31467 - DNA, 40 bp, Artificial Sequence
  Description of Artificial Sequence: Synthetic primer
atgaaaaaagagtataaatgtcttctaatttgaagaggcc

SEQ ID NO: 31468 - DNA, 40 bp, Artificial Sequence
  Description of Artificial Sequence: Synthetic primer
ataaagaattcgttgatcaaactcatctgtggtatatttt

SEQ ID NO: 31469 - DNA, 40 bp, Artificial Sequence
  Description of Artificial Sequence: Synthetic primer
cgagccctgtaattaattctgctgtactgccttgggtttc

SEQ ID NO: 31470 - DNA, 40 bp, Artificial Sequence
  Description of Artificial Sequence: Synthetic primer
gagcctcctccacgaaagcccgtcgaggaaaagagtgaag

SEQ ID NO: 31471 - DNA, 40 bp, Artificial Sequence
  Description of Artificial Sequence: Synthetic primer
tgagcagtaatctgaatatttctcaagttcaagggactta

SEQ ID NO: 31472 - DNA, 40 bp, Artificial Sequence
  Description of Artificial Sequence: Synthetic primer
cagctgggtcatcatcttgagttctgacatgagtgcctct

SEQ ID NO: 31473 - DNA, 40 bp, Artificial Sequence
  Description of Artificial Sequence: Synthetic primer
actgcaagcccagttgagccagaaggagcaggcagctgag

SEQ ID NO: 31474 - DNA, 40 bp, Artificial Sequence
  Description of Artificial Sequence: Synthetic primer
aaaccagtatagtccccctgtagtcaaggcttcagatgtc

SEQ ID NO: 31475 - DNA, 40 bp, Artificial Sequence
  Description of Artificial Sequence: Synthetic primer
tctgttgaaagtaacatgagaactggagcaggaggaagag

SEQ ID NO: 31476 - DNA, 40 bp, Artificial Sequence
  Description of Artificial Sequence: Synthetic primer
tgtctttcaaaacttgtcagccgagtcagtcctttacctg

SEQ ID NO: 31477 - DNA, 40 bp, Artificial Sequence
  Description of Artificial Sequence: Synthetic primer
gaaatagtagtgtacaccggtaaagaagggaaaagctctc

SEQ ID NO: 31478 - DNA, 40 bp, Artificial Sequence
  Description of Artificial Sequence: Synthetic primer
gatgggtgaagaaagggacgtataaattctgggaaacctc

SEQ ID NO: 31479 - DNA, 40 bp, Artificial Sequence
  Description of Artificial Sequence: Synthetic primer
tccccatgggctcccactgcagcctcgagtgcccctgtcc

SEQ ID NO: 31480 - DNA, 40 bp, Artificial Sequence
  Description of Artificial Sequence: Synthetic primer
agcaccgcgcctagggaggccgcgccgcccgagacgtgcg

SEQ ID NO: 31481 - DNA, 40 bp, Artificial Sequence
  Description of Artificial Sequence: Synthetic primer
aatatggttcaaatgtaacagtgcagaattgaatatggag

SEQ ID NO: 31482 - DNA, 40 bp, Artificial Sequence
  Description of Artificial Sequence: Synthetic primer
ctctcatagtttgacattgctggagacagaatagtactgc

SEQ ID NO: 31483 - DNA, 40 bp, Artificial Sequence
  Description of Artificial Sequence: Synthetic primer
cgatcctgccgctgcccaccccggacgccgagactgagaa

SEQ ID NO: 31484 - DNA, 40 bp, Artificial Sequence
  Description of Artificial Sequence: Synthetic primer
ctccttcaggtccccccgggaggggcagtggtgaaagcgc

SEQ ID NO: 31485 - DNA, 40 bp, Artificial Sequence
  Description of Artificial Sequence: Synthetic primer
tctcctgagggaggagaattcctagggacaagacccagac

SEQ ID NO: 31486 - DNA, 40 bp, Artificial Sequence
  Description of Artificial Sequence: Synthetic primer
cccccaccccaaccaaaattccacactctttggaataaac

SEQ ID NO: 31487 - DNA, 40 bp, Artificial Sequence
  Description of Artificial Sequence: Synthetic primer
ttccccttcgaaaataaattctaaaatgatgtggaatgtg

SEQ ID NO: 31488 - DNA, 40 bp, Artificial Sequence
  Description of Artificial Sequence: Synthetic primer
ggaagtgtctcttggctgcggtgtgcatgggtgcgtgtgc

SEQ ID NO: 31489 - DNA, 40 bp, Artificial Sequence
  Description of Artificial Sequence: Synthetic primer
ctcatactaagaattcctcactctgacatgacagtatttt

SEQ ID NO: 31490 - DNA, 40 bp, Artificial Sequence
  Description of Artificial Sequence: Synthetic primer
cttgccgggcagctggtgagtcggtgacctggcctgtgag

SEQ ID NO: 31491 - DNA, 40 bp, Artificial Sequence
  Description of Artificial Sequence: Synthetic primer
gttcacttcctttcctgacagtggcttctctggggtcaag

SEQ ID NO: 31492 - DNA, 40 bp, Artificial Sequence
  Description of Artificial Sequence: Synthetic primer
atcgtctctagtcaatgaatcagaaacgaatcaaaacagc

SEQ ID NO: 31493 - DNA, 40 bp, Artificial Sequence
  Description of Artificial Sequence: Synthetic primer
gtgccactaacaccccaggcacaaggtgctggacatgtgg

SEQ ID NO: 31494 - DNA, 40 bp, Artificial Sequence
  Description of Artificial Sequence: Synthetic primer
gagaaagcacctgcatgccttcattatggacagctctcag

SEQ ID NO: 31495 - DNA, 40 bp, Artificial Sequence
  Description of Artificial Sequence: Synthetic primer
gatgatagccagtgaggttcttaaagtttgcagtattctc

SEQ ID NO: 31496 - DNA, 40 bp, Artificial Sequence
  Description of Artificial Sequence: Synthetic primer
cttgctgcggcagcagctaatgcgggcccaggcgcaggag

SEQ ID NO: 31497 - DNA, 40 bp, Artificial Sequence
  Description of Artificial Sequence: Synthetic primer
tccctttggagtgacgcattttgtgcattaaattctaggg

SEQ ID NO: 31498 - DNA, 40 bp, Artificial Sequence; identical to SEQ ID NO: 22847
  Description of Artificial Sequence: Synthetic primer

SEQ ID NO: 31499 - DNA, 40 bp, Artificial Sequence
  Description of Artificial Sequence: Synthetic primer
atttgggtcatcatctttattgttgccatctcctccaatc

SEQ ID NO: 31500 - DNA, 40 bp, Artificial Sequence
  Description of Artificial Sequence: Synthetic primer
tctcttgaccatgcgtgtgtcaacggaggaggaattaaag

SEQ ID NO: 31501 - DNA, 40 bp, Artificial Sequence
  Description of Artificial Sequence: Synthetic primer
ggataattattttgtgaaagacacatctgaagctcctagc

SEQ ID NO: 31502 - DNA, 40 bp, Artificial Sequence
  Description of Artificial Sequence: Synthetic primer
atcagtgctttctttagactgtctcggactgtaactccac

SEQ ID NO: 31503 - DNA, 40 bp, Artificial Sequence
  Description of Artificial Sequence: Synthetic primer
acccagcccctgccagaacggggccacctgcacggactac

SEQ ID NO: 31504 - DNA, 40 bp, Artificial Sequence
  Description of Artificial Sequence: Synthetic primer
agtacggccagatgtacatcaaggcctccggcagctatgc

SEQ ID NO: 31505 - DNA, 40 bp, Artificial Sequence
  Description of Artificial Sequence: Synthetic primer
caaaaggaagggaccagtacctcatggagacaggcagtcg

SEQ ID NO: 31506 - DNA, 40 bp, Artificial Sequence
  Description of Artificial Sequence: Synthetic primer
ccattcccaagcagagaagagtagaggggaagggctccag

SEQ ID NO: 31507 - DNA, 40 bp, Artificial Sequence
  Description of Artificial Sequence: Synthetic primer
attgtcacagagggctttgtgaattgctgtcttcttgtca

SEQ ID NO: 31508 - DNA, 40 bp, Artificial Sequence
  Description of Artificial Sequence: Synthetic primer
atgaagaggtaattcacttgaacaactttcactgccatcg

SEQ ID NO: 31509 - DNA, 40 bp, Artificial Sequence
  Description of Artificial Sequence: Synthetic primer
cggctgtttctcccttggttacagttcggtccaacagtgg

SEQ ID NO: 31510 - DNA, 40 bp, Artificial Sequence
  Description of Artificial Sequence: Synthetic primer
tagcaccaaggacacgtttcccctcaagactccacgaatg

SEQ ID NO: 31511 - DNA, 40 bp, Artificial Sequence
  Description of Artificial Sequence: Synthetic primer
ccaaattatgggtatcttgatttttttcaaaaattggttg

SEQ ID NO: 31512 - DNA, 40 bp, Artificial Sequence
  Description of Artificial Sequence: Synthetic primer
tccctttgcctccccatctggtgctttcttgcatctacac

SEQ ID NO: 31513 - DNA, 40 bp, Artificial Sequence
  Description of Artificial Sequence: Synthetic primer
aaagttgctgacaagctgctgaagtggcctctccatattc

SEQ ID NO: 31514 - DNA, 40 bp, Artificial Sequence
  Description of Artificial Sequence: Synthetic primer
gtagagagcactattcacaaaaatattaacaggtaaatgc

SEQ ID NO: 31515 - DNA, 40 bp, Artificial Sequence
  Description of Artificial Sequence: Synthetic primer
taacacttttagatgagaaaatgcttgtatcatacagggc

SEQ ID NO: 31516 - DNA, 40 bp, Artificial Sequence
  Description of Artificial Sequence: Synthetic primer
tgaaatagtgagtataagccaacactttgtgataggtttg

SEQ ID NO: 31517 - DNA, 40 bp, Artificial Sequence
  Description of Artificial Sequence: Synthetic primer
agtcaaaggtctggctgcagagtttgcattcatggttcag

SEQ ID NO: 31518 - DNA, 40 bp, Artificial Sequence
  Description of Artificial Sequence: Synthetic primer
ttcaataaaacaagggaaaaaataagcaatgaagtaactg

SEQ ID NO: 31519 - DNA, 40 bp, Artificial Sequence
  Description of Artificial Sequence: Synthetic primer
ctgttgaagtccattgcagacgatataaggcttccagcac

SEQ ID NO: 31520 - DNA, 40 bp, Artificial Sequence
  Description of Artificial Sequence: Synthetic primer
gatgatggacgtggaggggaagtgcagggctgatgctgtg

SEQ ID NO: 31521 - DNA, 40 bp, Artificial Sequence
  Description of Artificial Sequence: Synthetic primer
caatgcagaattctaggtaatttgaaaataaattcagtgc

SEQ ID NO: 31522 - DNA, 40 bp, Artificial Sequence
  Description of Artificial Sequence: Synthetic primer
gggcaggttcctgccggtcatctcgcttccacataaacac

SEQ ID NO: 31523 - DNA, 40 bp, Artificial Sequence
  Description of Artificial Sequence: Synthetic primer
ctgtggctgcgggggcaccgcactggggttgcccaagatg

SEQ ID NO: 31524 - DNA, 40 bp, Artificial Sequence
  Description of Artificial Sequence: Synthetic primer
cgggggcaggagccgccaaggagggggccgggcacaatgc

SEQ ID NO: 31525 - DNA, 40 bp, Artificial Sequence
  Description of Artificial Sequence: Synthetic primer
agaagatgacacactgctcaccacccggttaaaagcagac

SEQ ID NO: 31526 - DNA, 40 bp, Artificial Sequence
  Description of Artificial Sequence: Synthetic primer
acatcagacccctgcccagctgtacacactgcagcccaag

SEQ ID NO: 31527 - DNA, 40 bp, Artificial Sequence
  Description of Artificial Sequence: Synthetic primer
ccgacatgccggccacctggtccaggccgatgatgcggtc

SEQ ID NO: 31528 - DNA, 40 bp, Artificial Sequence
  Description of Artificial Sequence: Synthetic primer
ttcactctgagggagcagctggcgtgttgaaggggaaagg

SEQ ID NO: 31529 - DNA, 40 bp, Artificial Sequence
  Description of Artificial Sequence: Synthetic primer
aatgtcagctcagggccaagtaggtaaagccacccaagtc

SEQ ID NO: 31530 - DNA, 40 bp, Artificial Sequence
  Description of Artificial Sequence: Synthetic primer
tcatggtgtaggggtggctcatggacatctgcgggtcctc

SEQ ID NO: 31531 - DNA, 40 bp, Artificial Sequence
  Description of Artificial Sequence: Synthetic primer
gcacagagacaccactgacgtgcctgagatgcctcactcc

SEQ ID NO: 31532 - DNA, 40 bp, Artificial Sequence
  Description of Artificial Sequence: Synthetic primer
agcgagtggagcccggaggccatgggcacgccttggacag

SEQ ID NO: 31533 - DNA, 40 bp, Artificial Sequence
  Description of Artificial Sequence: Synthetic primer
cccctttctcattcttgtggccctacacacatctccagtg

SEQ ID NO: 31534 - DNA, 40 bp, Artificial Sequence
  Description of Artificial Sequence: Synthetic primer
gcgagatctccgctcgggtcagccagaagcccttgactgc

SEQ ID NO: 31535 - DNA, 40 bp, Artificial Sequence
  Description of Artificial Sequence: Synthetic primer
ggggtcgttctcgctcttgaacttggccaccacggacttg

SEQ ID NO: 31536 - DNA, 40 bp, Artificial Sequence
  Description of Artificial Sequence: Synthetic primer
cactttcaattatttcaaaagggagaaatgagaacaaaaa

SEQ ID NO: 31537 - DNA, 40 bp, Artificial Sequence
  Description of Artificial Sequence: Synthetic primer
agattggagacctgttccaggtgaccacaatccttcacag

SEQ ID NO: 31538 - DNA, 40 bp, Artificial Sequence
  Description of Artificial Sequence: Synthetic primer
gaatgtgaatgagtcacttaacagggaatctaaagagctg

SEQ ID NO: 31539 - DNA, 40 bp, Artificial Sequence
  Description of Artificial Sequence: Synthetic primer
agaaaaaggaaaacaaaacaaactgatgaaatggaaattg

SEQ ID NO: 31540 - DNA, 40 bp, Artificial Sequence
  Description of Artificial Sequence: Synthetic primer
tgagtggttgggaggacgggggcagccttggctggagaag

SEQ ID NO: 31541 - DNA, 40 bp, Artificial Sequence
  Description of Artificial Sequence: Synthetic primer
agttaaaaaaatataaacgaaggcagtgatacagcttgtc

SEQ ID NO: 31542 - DNA, 40 bp, Artificial Sequence
  Description of Artificial Sequence: Synthetic primer
cccccttaaaaagtggactcagctccctggcgggagcccc

SEQ ID NO: 31543 - DNA, 40 bp, Artificial Sequence
  Description of Artificial Sequence: Synthetic primer
cctcatatccagcctcctgcagaccaaccctctggtcagg

SEQ ID NO: 31544 - DNA, 40 bp, Artificial Sequence
  Description of Artificial Sequence: Synthetic primer
gccagcccggcggcccctctccctcctgctttccccggcc

SEQ ID NO: 31545 - DNA, 40 bp, Artificial Sequence
  Description of Artificial Sequence: Synthetic primer
ttgggaattttcagatcccatgtggattctagtagtttat

SEQ ID NO: 31546 - DNA, 40 bp, Artificial Sequence
  Description of Artificial Sequence: Synthetic primer
atgtggtccaggttggccacagacagcttagaagccattc

SEQ ID NO: 31547 - DNA, 40 bp, Artificial Sequence
  Description of Artificial Sequence: Synthetic primer
gggggctgttgccattatgggctcagaatctaaatcttac

SEQ ID NO: 31548 - DNA, 40 bp, Artificial Sequence
  Description of Artificial Sequence: Synthetic primer
agatcgaaggcagcaaagccgtgccctgggtgattctgtc

SEQ ID NO: 31549 - DNA, 40 bp, Artificial Sequence
  Description of Artificial Sequence: Synthetic primer
taattattttgattgctggaataaagcatgtggaaatgac

SEQ ID NO: 31550 - DNA, 40 bp, Artificial Sequence
  Description of Artificial Sequence: Synthetic primer
cgtctggacgatgtccttggctacatcaatcctgaaatgc

SEQ ID NO: 31551 - DNA, 40 bp, Artificial Sequence
  Description of Artificial Sequence: Synthetic primer
aggcgagttgggcgtgctcgaggctggggagctgctctgg

SEQ ID NO: 31552 - DNA, 40 bp, Artificial Sequence
  Description of Artificial Sequence: Synthetic primer
acaagcaggcacatctgtcctcagcccctccagaaagagg

SEQ ID NO: 31553 - DNA, 40 bp, Artificial Sequence
  Description of Artificial Sequence: Synthetic primer
ccagaacaagtcaagtggaaagtggagaaattatctgtat

SEQ ID NO: 31554 - DNA, 40 bp, Artificial Sequence
  Description of Artificial Sequence: Synthetic primer
ctttgggcttcttttcatatttccgtttcggtcggataag

SEQ ID NO: 31555 - DNA, 40 bp, Artificial Sequence
  Description of Artificial Sequence: Synthetic primer
agacgccacggccacccctccctcctccccatctatgagc

SEQ ID NO: 31556 - DNA, 40 bp, Artificial Sequence
  Description of Artificial Sequence: Synthetic primer
cagggataggcactggaacatattctgtcctccaagtatc

SEQ ID NO: 31557 - DNA, 40 bp, Artificial Sequence
  Description of Artificial Sequence: Synthetic primer
ttggagtctgcaggctgcgaaggcacttgggcctggcttg

SEQ ID NO: 31558 - DNA, 40 bp, Artificial Sequence
  Description of Artificial Sequence: Synthetic primer
atttacaattctgagtgaacagaaatccaaaacacaggag

SEQ ID NO: 31559 - DNA, 40 bp, Artificial Sequence
  Description of Artificial Sequence: Synthetic primer
cagaagttcttgggagtcttgttgctgaaacccatcaaac

SEQ ID NO: 31560 - DNA, 40 bp, Artificial Sequence
  Description of Artificial Sequence: Synthetic primer
aaactgaattgatatcagtatcacagtggagtcttttgaa

SEQ ID NO: 31561 - DNA, 40 bp, Artificial Sequence
  Description of Artificial Sequence: Synthetic primer
tctgcgtttatggaatacaactgaggttgctccagcacta

SEQ ID NO: 31562 - DNA, 40 bp, Artificial Sequence
  Description of Artificial Sequence: Synthetic primer
tcgccagctccgcgtcagccatggctgcgtcagcaagatc

SEQ ID NO: 31563 - DNA, 40 bp, Artificial Sequence
  Description of Artificial Sequence: Synthetic primer
tggaactgcaggatcaaatgatcttatactgctatagctg

SEQ ID NO: 31564 - DNA, 40 bp, Artificial Sequence
  Description of Artificial Sequence: Synthetic primer
gatccgagtgtgaatttcctgaagaacgttggggagagtg

SEQ ID NO: 31565 - DNA, 40 bp, Artificial Sequence
  Description of Artificial Sequence: Synthetic primer
gcatgaagcctaaagccatttcttccaaaaacaacattgc

SEQ ID NO: 31566 - DNA, 40 bp, Artificial Sequence
  Description of Artificial Sequence: Synthetic primer
ctacttttatttgaatgaggaaaccctgtgtatcagttag

SEQ ID NO: 31567 - DNA, 40 bp, Artificial Sequence
  Description of Artificial Sequence: Synthetic primer
ttactttacaatttgccataaatactgcgttttgcttgac

SEQ ID NO: 31568 - DNA, 40 bp, Artificial Sequence
  Description of Artificial Sequence: Synthetic primer
gcagtacccccgcccctcttctcccaccacaatgagatcc

SEQ ID NO: 31569 - DNA, 40 bp, Artificial Sequence
  Description of Artificial Sequence: Synthetic primer
ttgagacactccagatgaaggttggtgtggggctgtgctg

SEQ ID NO: 31570 - DNA, 40 bp, Artificial Sequence
  Description of Artificial Sequence: Synthetic primer
acacagtatcccaggatatggaggcaaggggaacaaagag

SEQ ID NO: 31571 - DNA, 40 bp, Artificial Sequence
  Description of Artificial Sequence: Synthetic primer
ttgcagcccggggacagaggccagctgggatctgcctgag

SEQ ID NO: 31572 - DNA, 40 bp, Artificial Sequence
  Description of Artificial Sequence: Synthetic primer
cgcatttaaagggactcaaggtgcctgccacttcctcagc

SEQ ID NO: 31573 - DNA, 40 bp, Artificial Sequence
  Description of Artificial Sequence: Synthetic primer
caagcaccagtgtattactgctatgaaagaatatgaaagc

SEQ ID NO: 31574 - DNA, 40 bp, Artificial Sequence
  Description of Artificial Sequence: Synthetic primer
ttggaggtcagaagcagaggcatctgtaaagtcatgtgtc

SEQ ID NO: 31575 - DNA, 40 bp, Artificial Sequence
  Description of Artificial Sequence: Synthetic primer
gtgtacaagatgaaaataattcactaaatttgcccttttt

SEQ ID NO: 31576 - DNA, 40 bp, Artificial Sequence
  Description of Artificial Sequence: Synthetic primer
ctttgctgcagaatcaccagctccgagaccacaacatcag

SEQ ID NO: 31577 - DNA, 40 bp, Artificial Sequence
  Description of Artificial Sequence: Synthetic primer
agattcagttatgccattctccaggtgaccagcttcatag

SEQ ID NO: 31578 - DNA, 40 bp, Artificial Sequence
  Description of Artificial Sequence: Synthetic primer
ggtaccccagatattggctcaataagcaatcttttaatca

SEQ ID NO: 31579 - DNA, 40 bp, Artificial Sequence
  Description of Artificial Sequence: Synthetic primer
gcccaacttctgctggcatctccatactctcaccgatcac

SEQ ID NO: 31580 - DNA, 40 bp, Artificial Sequence
  Description of Artificial Sequence: Synthetic primer
tgaagcagatctacttctgggatgagtcaattgtgcagat

SEQ ID NO: 31581 - DNA, 40 bp, Artificial Sequence
  Description of Artificial Sequence: Synthetic primer
tcttggagatttagtggtccctgctgactttgtgcagctc

SEQ ID NO: 31582 - DNA, 40 bp, Artificial Sequence
  Description of Artificial Sequence: Synthetic primer
ataatcatctccctcacttggtggacatgcccaaatatgc

SEQ ID NO: 31583 - DNA, 40 bp, Artificial Sequence
  Description of Artificial Sequence: Synthetic primer
gtcgctgtcactgccatggctgctggggggcgtcggaggc

SEQ ID NO: 31584 - DNA, 40 bp, Artificial Sequence
  Description of Artificial Sequence: Synthetic primer
caaggttcacatgtgctagacatactggcactttcatacc

SEQ ID NO: 31585 - DNA, 40 bp, Artificial Sequence
  Description of Artificial Sequence: Synthetic primer
tggcactgagatatttattgtttatttatcagtgacagag

SEQ ID NO: 31586 - DNA, 40 bp, Artificial Sequence
  Description of Artificial Sequence: Synthetic primer
attcataactgaagataaaactgaactgtacatgctcttc

SEQ ID NO: 31587 - DNA, 40 bp, Artificial Sequence
  Description of Artificial Sequence: Synthetic primer
tactctcaacaagttctttttttatggggtatttcagttg

SEQ ID NO: 31588 - DNA, 40 bp, Artificial Sequence
  Description of Artificial Sequence: Synthetic primer
cactggacagcatcagaaatcctctgttaatgtggactgg

SEQ ID NO: 31589 - DNA, 40 bp, Artificial Sequence
  Description of Artificial Sequence: Synthetic primer
cagttgtcagacaaagccctcgaaggattaagccagttag

SEQ ID NO: 31590 - DNA, 40 bp, Artificial Sequence
  Description of Artificial Sequence: Synthetic primer
ccacctcctgcaggcgcgtgtcgcctcgggtccctgcagc

SEQ ID NO: 31591 - DNA, 40 bp, Artificial Sequence
  Description of Artificial Sequence: Synthetic primer
ggagttcaaacgccgagtcttctttctgactcaatgttgc

SEQ ID NO: 31592 - DNA, 40 bp, Artificial Sequence
  Description of Artificial Sequence: Synthetic primer
ctcccagactccccatttcagcatcccactcgtcgaaaac

SEQ ID NO: 31593 - DNA, 40 bp, Artificial Sequence
  Description of Artificial Sequence: Synthetic primer
aacagacattccacagggcctgggcccctgggaggtgagg

SEQ ID NO: 31594 - DNA, 40 bp, Artificial Sequence
  Description of Artificial Sequence: Synthetic primer
aacctgaacaggagaccgaccccttgcctgtcgtgtccag

SEQ ID NO: 31595 - DNA, 40 bp, Artificial Sequence
  Description of Artificial Sequence: Synthetic primer
gattttcaaggattacttttttgtattatcaaaaaaatac

SEQ ID NO: 31596 - DNA, 40 bp, Artificial Sequence
  Description of Artificial Sequence: Synthetic primer
tgccctctaaaaatttcctcagatctgaagtatggtcttg

SEQ ID NO: 31597 - DNA, 40 bp, Artificial Sequence
  Description of Artificial Sequence: Synthetic primer
cccgagacagcgatctctctcttctcctatctctagaaag

SEQ ID NO: 31598 - DNA, 40 bp, Artificial Sequence
  Description of Artificial Sequence: Synthetic primer
acctgtcctatgtgcaaacttaatatattgaaggccctgg

SEQ ID NO: 31599 - DNA, 40 bp, Artificial Sequence
  Description of Artificial Sequence: Synthetic primer
taaatttcaccagcgttgtagtacagaagttccactgatg

SEQ ID NO: 31600 - DNA, 40 bp, Artificial Sequence
  Description of Artificial Sequence: Synthetic primer
tatcaactctacaaagtgccccccagcagcagacctcctc

SEQ ID NO: 31601 - DNA, 40 bp, Artificial Sequence
  Description of Artificial Sequence: Synthetic primer
ccaaggccctgctgggtcgagcagttttccaaggctattc

SEQ ID NO: 31602 - DNA, 40 bp, Artificial Sequence
  Description of Artificial Sequence: Synthetic primer
ctggtttattgcgacgggcacggctgcagcgtcgcggtgc

SEQ ID NO: 31603 - DNA, 40 bp, Artificial Sequence
  Description of Artificial Sequence: Synthetic primer
agaatctatcacttgttcatcaaacacatggtccacaaac

SEQ ID NO: 31604 - DNA, 40 bp, Artificial Sequence
  Description of Artificial Sequence: Synthetic primer
acgaagctgttggctcttattctgcaattcttcttgtagc

SEQ ID NO: 31605 - DNA, 40 bp, Artificial Sequence
  Description of Artificial Sequence: Synthetic primer
aggggaaaaaaacagttgcatagagtatagctctgtagtg

SEQ ID NO: 31606 - DNA, 40 bp, Artificial Sequence
  Description of Artificial Sequence: Synthetic primer
tctgtttaaggcaggctggattgtcttattttggaaccag

SEQ ID NO: 31607 - DNA, 40 bp, Artificial Sequence
  Description of Artificial Sequence: Synthetic primer
tgtggaaacattggcaaattgtacctctggaatatacagg

SEQ ID NO: 31608 - DNA, 40 bp, Artificial Sequence
  Description of Artificial Sequence: Synthetic primer
atgcagtagtttccccctcgagacttgtgataaccacatc

SEQ ID NO: 31609 - DNA, 40 bp, Artificial Sequence
  Description of Artificial Sequence: Synthetic primer
agggcatggccccgctgggagggccccctgcagcagggag

SEQ ID NO: 31610 - DNA, 40 bp, Artificial Sequence
  Description of Artificial Sequence: Synthetic primer
gccggggaccctgggccagcctccccggcaggcggcgacg

SEQ ID NO: 31611 - DNA, 40 bp, Artificial Sequence
  Description of Artificial Sequence: Synthetic primer
cttgtaaaggagcaaggtttttaggcttggacagatcagg

SEQ ID NO: 31612 - DNA, 40 bp, Artificial Sequence
  Description of Artificial Sequence: Synthetic primer
ttgtaggtgcttcagctcttttaagtctaacatattttcc

SEQ ID NO: 31613 - DNA, 40 bp, Artificial Sequence
  Description of Artificial Sequence: Synthetic primer
gtggggaacagaggttggggtggcctagattctcagtatg

SEQ ID NO: 31614 - DNA, 40 bp, Artificial Sequence
  Description of Artificial Sequence: Synthetic primer
ttattccttctatacctcaaatctgattctaagaatttct

SEQ ID NO: 31615 - DNA, 40 bp, Artificial Sequence
  Description of Artificial Sequence: Synthetic primer
tatgaaaccccaatgctgccctttctgctcctttctccac

SEQ ID NO: 31616 - DNA, 40 bp, Artificial Sequence
  Description of Artificial Sequence: Synthetic primer
gatgaagtcagcccattatgtgaggctgcttaaatgccta

SEQ ID NO: 31617 - DNA, 40 bp, Artificial Sequence
  Description of Artificial Sequence: Synthetic primer
ctttttcatgttaatcttcagcttccccttggaggccttg

SEQ ID NO: 31618 - DNA, 40 bp, Artificial Sequence
  Description of Artificial Sequence: Synthetic primer
gatgttcaccgtgaacttccaccagtcccccgccttgtcc

SEQ ID NO: 31619 - DNA, 40 bp, Artificial Sequence
  Description of Artificial Sequence: Synthetic primer
acagccaaagacagaacttaacctctgcaagcaagattcg

SEQ ID NO: 31620 - DNA, 40 bp, Artificial Sequence
  Description of Artificial Sequence: Synthetic primer
ctgtgacatcatcaagcaccccatggacatgagcacaatc

SEQ ID NO: 31621 - DNA, 40 bp, Artificial Sequence
  Description of Artificial Sequence: Synthetic primer
acgacgaggaggctgctgaggcggcggccgctccccctgg

SEQ ID NO: 31622 - DNA, 40 bp, Artificial Sequence
  Description of Artificial Sequence: Synthetic primer
ctaccacctgtactacggcgcctcggccggctcctaccag

SEQ ID NO: 31623 - DNA, 40 bp, Artificial Sequence
  Description of Artificial Sequence: Synthetic primer
gtcctggagacttaccattgagccatgcaatctgggaagc

SEQ ID NO: 31624 - DNA, 40 bp, Artificial Sequence
  Description of Artificial Sequence: Synthetic primer
caaaccagttataaatggaacattcacttgtgtgccattc

SEQ ID NO: 31625 - DNA, 40 bp, Artificial Sequence
  Description of Artificial Sequence: Synthetic primer
ggcggaagataaagagaactacaagaaattctatgagcag

SEQ ID NO: 31626 - DNA, 40 bp, Artificial Sequence
  Description of Artificial Sequence: Synthetic primer
ttaaattctgcacgggaggaccttctgagtttacctgttg

SEQ ID NO: 31627 - DNA, 40 bp, Artificial Sequence
  Description of Artificial Sequence: Synthetic primer
ctaatttgcaaactcaatcggggactaaaatttcccactg

SEQ ID NO: 31628 - DNA, 40 bp, Artificial Sequence
  Description of Artificial Sequence: Synthetic primer
tgaagttcagtctttaaatcaagaaatggcctcgttactc

SEQ ID NO: 31629 - DNA, 40 bp, Artificial Sequence
  Description of Artificial Sequence: Synthetic primer
accgagcaaaagacgagtgatgccatttgggcttatttag

SEQ ID NO: 31630 - DNA, 40 bp, Artificial Sequence
  Description of Artificial Sequence: Synthetic primer
agctcacctgatttctccaccaattgctgctccctttctg

SEQ ID NO: 31631 - DNA, 40 bp, Artificial Sequence
  Description of Artificial Sequence: Synthetic primer
cagtgctgggacaaagatggggaaggtgtgtgaacttttt

SEQ ID NO: 31632 - DNA, 40 bp, Artificial Sequence
  Description of Artificial Sequence: Synthetic primer
cttcagtctgcaagtatggagctcaagttcttaattattc

SEQ ID NO: 31633 - DNA, 40 bp, Artificial Sequence
  Description of Artificial Sequence: Synthetic primer
cgaaaagccgaggaggaggttgcggcagcctacgccgacg

SEQ ID NO: 31634 - DNA, 40 bp, Artificial Sequence
  Description of Artificial Sequence: Synthetic primer
ttcctcatctgtactctgcttgcgaatagcattaactgac

SEQ ID NO: 31635 - DNA, 40 bp, Artificial Sequence
  Description of Artificial Sequence: Synthetic primer
catttcattatctcgaatgagaccagcctggagaagtcag

SEQ ID NO: 31636 - DNA, 40 bp, Artificial Sequence
  Description of Artificial Sequence: Synthetic primer
atctttttgacaggaaatttttgatgaaacaataaaataa

SEQ ID NO: 31637 - DNA, 40 bp, Artificial Sequence
  Description of Artificial Sequence: Synthetic primer
cagacagctgctcagagccaagggggcagagggctttcag

SEQ ID NO: 31638 - DNA, 40 bp, Artificial Sequence
  Description of Artificial Sequence: Synthetic primer
cattaaagatatcttttgacagtaaagtcaataataaatg

SEQ ID NO: 31639 - DNA, 40 bp, Artificial Sequence
  Description of Artificial Sequence: Synthetic primer
agcgtgttgatgcacttgcccgcatgctcgcaggggttgg

SEQ ID NO: 31640 - DNA, 40 bp, Artificial Sequence
  Description of Artificial Sequence: Synthetic primer
tatgaaaggaaacataaggagtttgtgtagtcagaacttg

SEQ ID NO: 31641 - DNA, 40 bp, Artificial Sequence
  Description of Artificial Sequence: Synthetic primer
aaagagtccccaatttacagtccagctgcatttgcatttc

SEQ ID NO: 31642 - DNA, 40 bp, Artificial Sequence
  Description of Artificial Sequence: Synthetic primer
cccggagtttgctaaaggaaccactgcgttttaaagatcc

SEQ ID NO: 31643 - DNA, 40 bp, Artificial Sequence
  Description of Artificial Sequence: Synthetic primer
atttgtggctcataaagcatttctgaaaaacagcaacctg

SEQ ID NO: 31644 - DNA, 40 bp, Artificial Sequence
  Description of Artificial Sequence: Synthetic primer
tcgcgtgggcacagaacccacggtttcccgctagttcttc

SEQ ID NO: 31645 - DNA, 40 bp, Artificial Sequence
  Description of Artificial Sequence: Synthetic primer
ggttccaatcacaagcttagttatcaggttgcatgccttg

SEQ ID NO: 31646 - DNA, 40 bp, Artificial Sequence
  Description of Artificial Sequence: Synthetic primer
aggtggaaaaagactcgaagggacagagcacagacaggat

SEQ ID NO: 31647 - DNA, 40 bp, Artificial Sequence
  Description of Artificial Sequence: Synthetic primer
ttcagaatcactgagaaaagaagaagaacaagctacagag

SEQ ID NO: 31648 - DNA, 40 bp, Artificial Sequence
  Description of Artificial Sequence: Synthetic primer
gggaaaatggctaatgttcttgtcagtgataacacttctt

SEQ ID NO: 31649 - DNA, 40 bp, Artificial Sequence
  Description of Artificial Sequence: Synthetic primer
gtcatgcctcaaaagatgccaaccaggttcactccactac

SEQ ID NO: 31650 - DNA, 40 bp, Artificial Sequence
  Description of Artificial Sequence: Synthetic primer
cctgctgagttgagtatatctatatccttcattaatatcc

SEQ ID NO: 31651 - DNA, 40 bp, Artificial Sequence
  Description of Artificial Sequence: Synthetic primer
tgtgggtgggcgtgataggagcccatgtacgggaggtctg

SEQ ID NO: 31652 - DNA, 40 bp, Artificial Sequence
  Description of Artificial Sequence: Synthetic primer
tggcgttcctcgtggggccggtccctgaagcccgtgtact

SEQ ID NO: 31653 - DNA, 40 bp, Artificial Sequence
  Description of Artificial Sequence: Synthetic primer
cgttactgtgcttcacagccaagtggagctgaatggagac

SEQ ID NO: 31654 - DNA, 40 bp, Artificial Sequence
  Description of Artificial Sequence: Synthetic primer
tccctcatctccttttggaaacacctctcatggattatac

SEQ ID NO: 31655 - DNA, 40 bp, Artificial Sequence
  Description of Artificial Sequence: Synthetic primer
gcggtggattgataatcccacagtggatgaccgtggagtc

SEQ ID NO: 31656 - DNA, 40 bp, Artificial Sequence
  Description of Artificial Sequence: Synthetic primer
ttcttcagcttcttggcttgccctttgctgagctctttgc

SEQ ID NO: 31657 - DNA, 40 bp, Artificial Sequence
  Description of Artificial Sequence: Synthetic primer
ttcaaagagtcctaaggagttaaatcttccaggtattttc

SEQ ID NO: 31658 - DNA, 40 bp, Artificial Sequence
  Description of Artificial Sequence: Synthetic primer
gcacggctgcttcccggagggtcgctccccacccggcgcc

SEQ ID NO: 31659 - DNA, 40 bp, Artificial Sequence
  Description of Artificial Sequence: Synthetic primer
cacagtaccactgagttagatttcagccacagatgcttag

SEQ ID NO: 31660 - DNA, 40 bp, Artificial Sequence
  Description of Artificial Sequence: Synthetic primer
cgaatgtccccaaccctgcatctagaccaggtctttctgg

SEQ ID NO: 31661 - DNA, 40 bp, Artificial Sequence
  Description of Artificial Sequence: Synthetic primer
gtggaattagtcctgggtttaattcagtgagcctgagaat

SEQ ID NO: 31662 - DNA, 40 bp, Artificial Sequence
  Description of Artificial Sequence: Synthetic primer
gaggcggcagcagtggaggcggcagcgggagcgggaatgg

SEQ ID NO: 31663 - DNA, 40 bp, Artificial Sequence
  Description of Artificial Sequence: Synthetic primer
ctcccgccggtggccgcgccgcagcctcgccaagcccagc

SEQ ID NO: 31664 - DNA, 40 bp, Artificial Sequence
  Description of Artificial Sequence: Synthetic primer
ccctcatccgattccgttgtatcagtcactgacagttaat

SEQ ID NO: 31665 - DNA, 40 bp, Artificial Sequence
  Description of Artificial Sequence: Synthetic primer
gaactggaacaggggagctggtgggaaagagtagcagatg

SEQ ID NO: 31666 - DNA, 40 bp, Artificial Sequence
  Description of Artificial Sequence: Synthetic primer
caaaaccccacagcaaaaggcagccagccagcaattagcc

SEQ ID NO: 31667 - DNA, 40 bp, Artificial Sequence
  Description of Artificial Sequence: Synthetic primer
ccctgcgtggtggtgccccgggcggcggcaaaggagacag

SEQ ID NO: 31668 - DNA, 40 bp, Artificial Sequence
  Description of Artificial Sequence: Synthetic primer
ctccgcctccacactgaccaagtgctggcccacccagtcc

SEQ ID NO: 31669 - DNA, 40 bp, Artificial Sequence
  Description of Artificial Sequence: Synthetic primer
caatatacttcctggcactgccctagaatgaaaacgaacc

SEQ ID NO: 31670 - DNA, 40 bp, Artificial Sequence
  Description of Artificial Sequence: Synthetic primer
tgatggttattggcattgcaaggtgactgtgactctggtg

SEQ ID NO: 31671 - DNA, 40 bp, Artificial Sequence
  Description of Artificial Sequence: Synthetic primer
tgcaaatacgcatatggacttgaagatacaacaccagctc

SEQ ID NO: 31672 - DNA, 40 bp, Artificial Sequence
  Description of Artificial Sequence: Synthetic primer
gggggagcttccttattctcacatcaacaaccgagatcag

SEQ ID NO: 31673 - DNA, 40 bp, Artificial Sequence
  Description of Artificial Sequence: Synthetic primer
gaattctatgaaaagtaggtctttggtcgggttcttgagc

SEQ ID NO: 31674 - DNA, 40 bp, Artificial Sequence
  Description of Artificial Sequence: Synthetic primer
tcgtcctggtttgtacttcaaaacctcactttgccactcc

SEQ ID NO: 31675 - DNA, 40 bp, Artificial Sequence
  Description of Artificial Sequence: Synthetic primer
ttaaaattaggtgcagacaaatcaaaggagctgaataaac

SEQ ID NO: 31676 - DNA, 40 bp, Artificial Sequence
  Description of Artificial Sequence: Synthetic primer
aatagcatttataagtccagagatgaagcaaacaacagtg

SEQ ID NO: 31677 - DNA, 40 bp, Artificial Sequence
  Description of Artificial Sequence: Synthetic primer
ctccaaggagcattggagagaatgcccctttctgggcttg

SEQ ID NO: 31678 - DNA, 40 bp, Artificial Sequence
  Description of Artificial Sequence: Synthetic primer
atgtacccaatactgtaaacgtatttttaagacagagtgc

SEQ ID NO: 31679 - DNA, 40 bp, Artificial Sequence
  Description of Artificial Sequence: Synthetic primer
cctgcacaatggccgctgcctggacaagatcaatgagttc

SEQ ID NO: 31680 - DNA, 40 bp, Artificial Sequence
  Description of Artificial Sequence: Synthetic primer
gttacgtgataatctgacactatggacttcagacatgcag

SEQ ID NO: 31681 - DNA, 40 bp, Artificial Sequence
  Description of Artificial Sequence: Synthetic primer
tccacagctcaacttatctcagttgctgaagtcctcttgg

SEQ ID NO: 31682 - DNA, 40 bp, Artificial Sequence
  Description of Artificial Sequence: Synthetic primer
ccagataagtctcacagttcccaataaggcaacagaatcc

SEQ ID NO: 31683 - DNA, 40 bp, Artificial Sequence
  Description of Artificial Sequence: Synthetic primer
gtttccagtgtccacactgctgcccgtgcagtgggaccag

SEQ ID NO: 31684 - DNA, 40 bp, Artificial Sequence
  Description of Artificial Sequence: Synthetic primer
ggctgggcccagcttccatgcttgcatcaggagcgggaaa

SEQ ID NO: 31685 - DNA, 40 bp, Artificial Sequence; identical to SEQ ID NO: 19328
  Description of Artificial Sequence: Synthetic primer

SEQ ID NO: 31686 - DNA, 40 bp, Artificial Sequence
  Description of Artificial Sequence: Synthetic primer
gtgtggaattctgtgcctggaccctgttccatgaagtctc

SEQ ID NO: 31687 - DNA, 40 bp, Artificial Sequence
  Description of Artificial Sequence: Synthetic primer
ccccgagttcgctgccagccccaagaaggagaccctcatc

SEQ ID NO: 31688 - DNA, 40 bp, Artificial Sequence
  Description of Artificial Sequence: Synthetic primer
cagtgtcaacataacagtgattaacaaagttcacataagc

SEQ ID NO: 31689 - DNA, 40 bp, Artificial Sequence
  Description of Artificial Sequence: Synthetic primer
aaacttgagtgtggtggagttcagtttctatctgggatac

SEQ ID NO: 31690 - DNA, 40 bp, Artificial Sequence
  Description of Artificial Sequence: Synthetic primer
tgcggcgccgcgcggccagccgggtcccgagcctccgcgg

SEQ ID NO: 31691 - DNA, 40 bp, Artificial Sequence
  Description of Artificial Sequence: Synthetic primer
gccaagattattaatatatattttggtaatcactattgac

SEQ ID NO: 31692 - DNA, 40 bp, Artificial Sequence
  Description of Artificial Sequence: Synthetic primer
gctcccgctgatgttggacatctgctgggtgacagcacag

SEQ ID NO: 31693 - DNA, 40 bp, Artificial Sequence
  Description of Artificial Sequence: Synthetic primer
ttcccaggggcgaggtcggcaaagcaacatggcagagcag

SEQ ID NO: 31694 - DNA, 40 bp, Artificial Sequence
  Description of Artificial Sequence: Synthetic primer
cccgcaggtgtgtatgtggtgcacagagggtgaggtttgg

SEQ ID NO: 31695 - DNA, 40 bp, Artificial Sequence
  Description of Artificial Sequence: Synthetic primer
acagcctccatttctagggcgctcagcatgtatgaagaag

SEQ ID NO: 31696 - DNA, 40 bp, Artificial Sequence
  Description of Artificial Sequence: Synthetic primer
ggttgctgctcccagcagcaacctggattacgcggccaat

SEQ ID NO: 31697 - DNA, 40 bp, Artificial Sequence
  Description of Artificial Sequence: Synthetic primer
gaagggttgaccccacagggcaggggggcccctcctcatg

SEQ ID NO: 31698 - DNA, 40 bp, Artificial Sequence
  Description of Artificial Sequence: Synthetic primer
ctccatctgaattaatggctgcttgaatgatcttcacaat

SEQ ID NO: 31699 - DNA, 40 bp, Artificial Sequence
  Description of Artificial Sequence: Synthetic primer
gaaattaccgtacctttgtttatccagtgcaaaaatgctg

SEQ ID NO: 31700 - DNA, 40 bp, Artificial Sequence
  Description of Artificial Sequence: Synthetic primer
gaagaatacttcgagggtgtcactttgcgctccttccaac

SEQ ID NO: 31701 - DNA, 40 bp, Artificial Sequence
  Description of Artificial Sequence: Synthetic primer
gaagtccactttataagagcacatacgttcaaaagcaaac

SEQ ID NO: 31702 - DNA, 40 bp, Artificial Sequence
  Description of Artificial Sequence: Synthetic primer
cagacgcagcgtctagtccctggccatagctccgccgctg

SEQ ID NO: 31703 - DNA, 40 bp, Artificial Sequence
  Description of Artificial Sequence: Synthetic primer
ggacctttatgttctaggaatttccacttgatgccttcag

SEQ ID NO: 31704 - DNA, 40 bp, Artificial Sequence
  Description of Artificial Sequence: Synthetic primer
attctatatcatgaacatcaacattgtcttctgaacaaac

SEQ ID NO: 31705 - DNA, 40 bp, Artificial Sequence
  Description of Artificial Sequence: Synthetic primer
gatggtggccgtcgctccccagccgtgcggccccgctcac

SEQ ID NO: 31706 - DNA, 40 bp, Artificial Sequence
  Description of Artificial Sequence: Synthetic primer
gcacttaagatccagcggagccagctggagaaaaaccttc

SEQ ID NO: 31707 - DNA, 40 bp, Artificial Sequence
  Description of Artificial Sequence: Synthetic primer
gaaggagttgctgacttctgactctcctccccataatgac

SEQ ID NO: 31708 - DNA, 40 bp, Artificial Sequence
  Description of Artificial Sequence: Synthetic primer
caatgtgaacttgactctgaggcctggagtaccaacacag

SEQ ID NO: 31709 - DNA, 40 bp, Artificial Sequence
  Description of Artificial Sequence: Synthetic primer
agacacctctgcttggccacagctttgctctttggtcctc

SEQ ID NO: 31710 - DNA, 40 bp, Artificial Sequence
  Description of Artificial Sequence: Synthetic primer
gcccggagagacctgaaaagtgctaaggctgatgccaagg

SEQ ID NO: 31711 - DNA, 40 bp, Artificial Sequence
  Description of Artificial Sequence: Synthetic primer
ctgacaccttttcctcttctcgccgtttcaaacaggctgc

SEQ ID NO: 31712 - DNA, 40 bp, Artificial Sequence
  Description of Artificial Sequence: Synthetic primer
tgtttctgaccaaagtgaattggaggcactctgctaaaag

SEQ ID NO: 31713 - DNA, 40 bp, Artificial Sequence
  Description of Artificial Sequence: Synthetic primer
ggctctgccggtgagacttcttgggctccgccagctcgtc

SEQ ID NO: 31714 - DNA, 40 bp, Artificial Sequence
  Description of Artificial Sequence: Synthetic primer
cgcggcggcggtggggagcccggggcgcacggtggcgccg

SEQ ID NO: 31715 - DNA, 40 bp, Artificial Sequence
  Description of Artificial Sequence: Synthetic primer
cagtaaagccttcagcaatgccagtgaccgagccaagcac

SEQ ID NO: 31716 - DNA, 40 bp, Artificial Sequence
  Description of Artificial Sequence: Synthetic primer
tttgtggccagtggagataacactctaagcataactaaag

SEQ ID NO: 31717 - DNA, 40 bp, Artificial Sequence
  Description of Artificial Sequence: Synthetic primer
tcagccccagaggctggtcctcggagatgctgaactgctg

SEQ ID NO: 31718 - DNA, 40 bp, Artificial Sequence
  Description of Artificial Sequence: Synthetic primer
gactcttccctggaagagcatattagacaggttcattgtg

SEQ ID NO: 31719 - DNA, 40 bp, Artificial Sequence
  Description of Artificial Sequence: Synthetic primer
acttgatttccgtgttttgttaaaatttcattgttctagc

SEQ ID NO: 31720 - DNA, 40 bp, Artificial Sequence
  Description of Artificial Sequence: Synthetic primer
gctacttcctctgctttggggctcagcttcatgactttac

SEQ ID NO: 31721 - DNA, 40 bp, Artificial Sequence
  Description of Artificial Sequence: Synthetic primer
acagggccaagttcaagtcgcatatgctgtactgttcctc

SEQ ID NO: 31722 - DNA, 40 bp, Artificial Sequence
  Description of Artificial Sequence: Synthetic primer
tgttctcatgacgtaattagaaagtaacttctcaaagtac

SEQ ID NO: 31723 - DNA, 40 bp, Artificial Sequence
  Description of Artificial Sequence: Synthetic primer
gaagcacgcgggcaagcaggactacaaccgcgaggaggac

SEQ ID NO: 31724 - DNA, 40 bp, Artificial Sequence
  Description of Artificial Sequence: Synthetic primer
atgagcaagacatgcttaatgcatatttcggcttgtgtat

SEQ ID NO: 31725 - DNA, 40 bp, Artificial Sequence
  Description of Artificial Sequence: Synthetic primer
tcacaagtcaaaaacttctcttgttccgcatgaaataatc

SEQ ID NO: 31726 - DNA, 40 bp, Artificial Sequence
  Description of Artificial Sequence: Synthetic primer
ttacctctatgtagtctctgaaaatggaagaaaatatagc

SEQ ID NO: 31727 - DNA, 40 bp, Artificial Sequence
  Description of Artificial Sequence: Synthetic primer
ggggcagcttgcacagtcttgggcatcgaggttggaggtg

SEQ ID NO: 31728 - DNA, 40 bp, Artificial Sequence
  Description of Artificial Sequence: Synthetic primer
caagggaatcttcatctccatcctgctggtgattctcatc

SEQ ID NO: 31729 - DNA, 40 bp, Artificial Sequence
  Description of Artificial Sequence: Synthetic primer
ccaacaacttaactttagctaatctcagggattcccaagc

SEQ ID NO: 31730 - DNA, 40 bp, Artificial Sequence
  Description of Artificial Sequence: Synthetic primer
cgccaggctcttcttcacctgggcccacgcctctcccaag

SEQ ID NO: 31731 - DNA, 40 bp, Artificial Sequence
  Description of Artificial Sequence: Synthetic primer
ttgttttgtttgccccatttccttttgtgtttttatagtc

SEQ ID NO: 31732 - DNA, 40 bp, Artificial Sequence
  Description of Artificial Sequence: Synthetic primer
gtgagctctttgttttctagtgaaagcttgttgcagtgtg

SEQ ID NO: 31733 - DNA, 40 bp, Artificial Sequence
  Description of Artificial Sequence: Synthetic primer
agggctaagccacgaccttatccatgagtggcgaagacac

SEQ ID NO: 31734 - DNA, 40 bp, Artificial Sequence
  Description of Artificial Sequence: Synthetic primer
cttcctccctaactaccatggttagcagcagccttttagc

SEQ ID NO: 31735 - DNA, 40 bp, Artificial Sequence
  Description of Artificial Sequence: Synthetic primer
ctgggactcttggaactgggcttggtgcaggatttggaac

SEQ ID NO: 31736 - DNA, 40 bp, Artificial Sequence
  Description of Artificial Sequence: Synthetic primer
tgttcttgtttgtgtacagggcagaaaacagggcgttgac

SEQ ID NO: 31737 - DNA, 40 bp, Artificial Sequence
  Description of Artificial Sequence: Synthetic primer
atatgaactgaacatggggtctgaatggtcctgaactatc

SEQ ID NO: 31738 - DNA, 40 bp, Artificial Sequence
  Description of Artificial Sequence: Synthetic primer
gcgagctgctccattttcgtcataccctctgaaaccaaag

SEQ ID NO: 31739 - DNA, 40 bp, Artificial Sequence
  Description of Artificial Sequence: Synthetic primer
gatactttggttctcagttccagaagttccctttctgttg

SEQ ID NO: 31740 - DNA, 40 bp, Artificial Sequence
  Description of Artificial Sequence: Synthetic primer
acctctcgccaagggccccaatgagtggcacacagtctac

SEQ ID NO: 31741 - DNA, 40 bp, Artificial Sequence
  Description of Artificial Sequence: Synthetic primer
gcgtgtctcactgccctggttgctgctggagggcaagagc

SEQ ID NO: 31742 - DNA, 40 bp, Artificial Sequence
  Description of Artificial Sequence: Synthetic primer
tgatgaactgaccactttggcagatgaagctcagtctctg

SEQ ID NO: 31743 - DNA, 40 bp, Artificial Sequence
  Description of Artificial Sequence: Synthetic primer
agttgctttatcaagtcatattatatttttatgagctaag

SEQ ID NO: 31744 - DNA, 40 bp, Artificial Sequence
  Description of Artificial Sequence: Synthetic primer
ccttcgaggacaccccggtggtgcaaatggccacgctgac

SEQ ID NO: 31745 - DNA, 40 bp, Artificial Sequence
  Description of Artificial Sequence: Synthetic primer
catttcagggaggaacgtctttccctccaggaaaacgact

SEQ ID NO: 31746 - DNA, 40 bp, Artificial Sequence
  Description of Artificial Sequence: Synthetic primer
gtgagatcactgatgaagatatcgatggtattttggaaag

SEQ ID NO: 31747 - DNA, 40 bp, Artificial Sequence
  Description of Artificial Sequence: Synthetic primer
gatcttatagattttctcagctagaaggtggtagtattcc

SEQ ID NO: 31748 - DNA, 40 bp, Artificial Sequence
  Description of Artificial Sequence: Synthetic primer
ttgcctgcgagactgttcctgggagacaggggggcacaat

SEQ ID NO: 31749 - DNA, 40 bp, Artificial Sequence
  Description of Artificial Sequence: Synthetic primer
tttctgagctagaagattttattaatggacccaacaatgc

SEQ ID NO: 31750 - DNA, 40 bp, Artificial Sequence
  Description of Artificial Sequence: Synthetic primer
ttgtgttggcgctgtggcatctgagaaggattttaatgac

SEQ ID NO: 31751 - DNA, 40 bp, Artificial Sequence
  Description of Artificial Sequence: Synthetic primer
cccattcaggcaggatatatactctcctaatacccacagg

SEQ ID NO: 31752 - DNA, 40 bp, Artificial Sequence
  Description of Artificial Sequence: Synthetic primer
tgggcgtgggcgacgagagccgcgccctgcccgacgtcat

SEQ ID NO: 31753 - DNA, 40 bp, Artificial Sequence
  Description of Artificial Sequence: Synthetic primer
ctcgaccatgaatatactaccaaggaaatatttaggaaaa

SEQ ID NO: 31754 - DNA, 40 bp, Artificial Sequence
  Description of Artificial Sequence: Synthetic primer
ctccagcccactgccccccgcctccttcggcttggtcatg

SEQ ID NO: 31755 - DNA, 40 bp, Artificial Sequence
  Description of Artificial Sequence: Synthetic primer
cgaacccccgaagccgcctcccccggaccccgcgctgggc

SEQ ID NO: 31756 - DNA, 40 bp, Artificial Sequence
  Description of Artificial Sequence: Synthetic primer
ctggtgcccccggccttggggcccatggtaggctccaggg

SEQ ID NO: 31757 - DNA, 40 bp, Artificial Sequence
  Description of Artificial Sequence: Synthetic primer
ctcctatgggaagctggtgcctgaggccgttggagatcag

SEQ ID NO: 31758 - DNA, 40 bp, Artificial Sequence
  Description of Artificial Sequence: Synthetic primer
ataatgttagcttacaagctgggaatataagtgcattaac

SEQ ID NO: 31759 - DNA, 40 bp, Artificial Sequence
  Description of Artificial Sequence: Synthetic primer
cctcattttgtctaatatgctccttaagttctaaattctc

SEQ ID NO: 31760 - DNA, 40 bp, Artificial Sequence
  Description of Artificial Sequence: Synthetic primer
cctgcaattacatcgcagaacagccctgaggcaagagaag

SEQ ID NO: 31761 - DNA, 40 bp, Artificial Sequence
  Description of Artificial Sequence: Synthetic primer
aggcggcccgggcggccttcactgccttgtccacatcttc

SEQ ID NO: 31762 - DNA, 40 bp, Artificial Sequence
  Description of Artificial Sequence: Synthetic primer
gttctcatctccaagtggctgttctccaactttcccaagc

SEQ ID NO: 31763 - DNA, 40 bp, Artificial Sequence
  Description of Artificial Sequence: Synthetic primer
agctttttatttccttttgtgatttccaagctcatttaag

SEQ ID NO: 31764 - DNA, 40 bp, Artificial Sequence
  Description of Artificial Sequence: Synthetic primer
agtgtcttaaagaacctaaaagctgggaccagtaaaatcc

SEQ ID NO: 31765 - DNA, 40 bp, Artificial Sequence
  Description of Artificial Sequence: Synthetic primer
ctcttggcaggctcaaaacaagcgacccttggtgctaaac

SEQ ID NO: 31766 - DNA, 40 bp, Artificial Sequence
  Description of Artificial Sequence: Synthetic primer
tggcagaggcagagaaaaatctgctttatcgtgagtggtc

SEQ ID NO: 31767 - DNA, 40 bp, Artificial Sequence
  Description of Artificial Sequence: Synthetic primer
gaggtgattgagactgagaagacgctgtacctggtgatgg

SEQ ID NO: 31768 - DNA, 40 bp, Artificial Sequence
  Description of Artificial Sequence: Synthetic primer
gaaaataagactattgaagaaaacaaatcacatggaaacc

SEQ ID NO: 31769 - DNA, 40 bp, Artificial Sequence
  Description of Artificial Sequence: Synthetic primer
gtaacattaaggggacaaatgttttactctgatgcttgac

SEQ ID NO: 31770 - DNA, 40 bp, Artificial Sequence
  Description of Artificial Sequence: Synthetic primer
ttgacaggtagtagataactgttccacttccaggcctttg

SEQ ID NO: 31771 - DNA, 40 bp, Artificial Sequence
  Description of Artificial Sequence: Synthetic primer
tcaccttatctttgtaagatgaggatatcatctagatcag

SEQ ID NO: 31772 - DNA, 40 bp, Artificial Sequence
  Description of Artificial Sequence: Synthetic primer
gagggtcagggggcaccagctctgtagactgcagcaaacc

SEQ ID NO: 31773 - DNA, 40 bp, Artificial Sequence
  Description of Artificial Sequence: Synthetic primer
atttatgaatgcagttgtgtttgtaaattactcagtgtcc

SEQ ID NO: 31774 - DNA, 40 bp, Artificial Sequence
  Description of Artificial Sequence: Synthetic primer
agtggtccagctcgtccccgcattccaacgtctccgactg

SEQ ID NO: 31775 - DNA, 40 bp, Artificial Sequence
  Description of Artificial Sequence: Synthetic primer
taatttagttcctcaacatattttcagtgtttatgcagac

SEQ ID NO: 31776 - DNA, 40 bp, Artificial Sequence
  Description of Artificial Sequence: Synthetic primer
gatgtcccaccaaaactgatgaccccagaggatcctgcac

SEQ ID NO: 31777 - DNA, 40 bp, Artificial Sequence
  Description of Artificial Sequence: Synthetic primer
gctcaggaatgtatccaggacttcaacactatgtttacaa

SEQ ID NO: 31778 - DNA, 40 bp, Artificial Sequence
  Description of Artificial Sequence: Synthetic primer
aagcaagcccttcgacccggaagcagtctgtccctaaaac

SEQ ID NO: 31779 - DNA, 40 bp, Artificial Sequence
  Description of Artificial Sequence: Synthetic primer
agtgcatcagtggaagaagtgttcagactacaacaagcac

SEQ ID NO: 31780 - DNA, 40 bp, Artificial Sequence
  Description of Artificial Sequence: Synthetic primer
ctcattcaagcatgaggatcccatgggccagcagggctcg

SEQ ID NO: 31781 - DNA, 40 bp, Artificial Sequence
  Description of Artificial Sequence: Synthetic primer
caatatatgacaagggcagataatttataagtgaatgtta

SEQ ID NO: 31782 - DNA, 40 bp, Artificial Sequence
  Description of Artificial Sequence: Synthetic primer
ctgcttcagcatagttcaaagcctttccaaacttttccac

SEQ ID NO: 31783 - DNA, 40 bp, Artificial Sequence
  Description of Artificial Sequence: Synthetic primer
ccacatcttctattatctcctgtctggggctggagagcac

SEQ ID NO: 31784 - DNA, 40 bp, Artificial Sequence
  Description of Artificial Sequence: Synthetic primer
cagaagatgaaataagggaagaggagagagaaagagcaac

SEQ ID NO: 31785 - DNA, 40 bp, Artificial Sequence
  Description of Artificial Sequence: Synthetic primer
tcaaggtcctggaggagaggcagcggttccaggaagagag

SEQ ID NO: 31786 - DNA, 40 bp, Artificial Sequence
  Description of Artificial Sequence: Synthetic primer
tttatgcaatttagcctgtaactaaaaattcacctgtatc

SEQ ID NO: 31787 - DNA, 40 bp, Artificial Sequence
  Description of Artificial Sequence: Synthetic primer
tgttactagactgtctggtggaaatatttatgtgttaaag

SEQ ID NO: 31788 - DNA, 40 bp, Artificial Sequence
  Description of Artificial Sequence: Synthetic primer
cttggtgcttcccaggagccgagccgaggagcagaagagg

SEQ ID NO: 31789 - DNA, 40 bp, Artificial Sequence
  Description of Artificial Sequence: Synthetic primer
caattgcccattttcccaattaaattaacctacgatttcc

SEQ ID NO: 31790 - DNA, 40 bp, Artificial Sequence
  Description of Artificial Sequence: Synthetic primer
caacaaatgaatggcacatttttctataacaaagcaaacc

SEQ ID NO: 31791 - DNA, 40 bp, Artificial Sequence
  Description of Artificial Sequence: Synthetic primer
ccagccccgggggctcagccccctgtgattccacaggcac

SEQ ID NO: 31792 - DNA, 40 bp, Artificial Sequence
  Description of Artificial Sequence: Synthetic primer
gctgcgtcacctaagggaacctgaatttgctggactcgtg

SEQ ID NO: 31793 - DNA, 40 bp, Artificial Sequence
  Description of Artificial Sequence: Synthetic primer
ccgagattgtctgcagaatgattagacttctatctctggt

SEQ ID NO: 31794 - DNA, 40 bp, Artificial Sequence
  Description of Artificial Sequence: Synthetic primer
gaaaatattgcaactgtgcatgaaactaaatagccatgtg

SEQ ID NO: 31795 - DNA, 40 bp, Artificial Sequence
  Description of Artificial Sequence: Synthetic primer
gggatcttcagagtgccaggatctcaggtggaagtcaatg

SEQ ID NO: 31796 - DNA, 40 bp, Artificial Sequence
  Description of Artificial Sequence: Synthetic primer
taggcccgccctgaacaataacctcacggagccgcccggc

SEQ ID NO: 31797 - DNA, 40 bp, Artificial Sequence
  Description of Artificial Sequence: Synthetic primer
agatgaggagactgagagaagtgcaaaggaacttggaaag

SEQ ID NO: 31798 - DNA, 40 bp, Artificial Sequence
  Description of Artificial Sequence: Synthetic primer
cagtctccttggggcttgtggccgtcctgtgaggcattag

SEQ ID NO: 31799 - DNA, 40 bp, Artificial Sequence
  Description of Artificial Sequence: Synthetic primer
gccacagaaaccgtccctgctacagagcaggagttgccgc

SEQ ID NO: 31800 - DNA, 40 bp, Artificial Sequence
  Description of Artificial Sequence: Synthetic primer
taaacatatacagtctaacgttaatgagaagatattttgg

SEQ ID NO: 31801 - DNA, 40 bp, Artificial Sequence
  Description of Artificial Sequence: Synthetic primer
agaaaagaacatcagggtgggtggggacaggccagtgacg

SEQ ID NO: 31802 - DNA, 40 bp, Artificial Sequence
  Description of Artificial Sequence: Synthetic primer
tggccctccttggcgtgtccttcggccgcctccagcaggt

SEQ ID NO: 31803 - DNA, 40 bp, Artificial Sequence
  Description of Artificial Sequence: Synthetic primer
tcacttggaatgacaaagttagatgtgatccggcattctg

SEQ ID NO: 31804 - DNA, 40 bp, Artificial Sequence
  Description of Artificial Sequence: Synthetic primer
tttgtgatatcacagtccccgatgcctatctgatcacaac

SEQ ID NO: 31805 - DNA, 40 bp, Artificial Sequence
  Description of Artificial Sequence: Synthetic primer
tctccctcttgttttgctcctggccctgcccctaggtctg

SEQ ID NO: 31806 - DNA, 40 bp, Artificial Sequence
  Description of Artificial Sequence: Synthetic primer
ggccttctaggaggtcctgggggtcgatgacctcagtctc

SEQ ID NO: 31807 - DNA, 40 bp, Artificial Sequence
  Description of Artificial Sequence: Synthetic primer
cctctgttattcattcatcaagcaggttaaagccattgtg

SEQ ID NO: 31808 - DNA, 40 bp, Artificial Sequence
  Description of Artificial Sequence: Synthetic primer
ggggccccagtgctcatgtttccctcaggccctattccag

SEQ ID NO: 31809 - DNA, 40 bp, Artificial Sequence
  Description of Artificial Sequence: Synthetic primer
agcagtaattcttctgctgtaaatgtaggcttttgtttcg

SEQ ID NO: 31810 - DNA, 40 bp, Artificial Sequence
  Description of Artificial Sequence: Synthetic primer
ttatacaacagtgctaaaaatgggacttcttttcacattc

SEQ ID NO: 31811 - DNA, 40 bp, Artificial Sequence
  Description of Artificial Sequence: Synthetic primer
gtgaggaaaggatttaagcttggaatggcatcatcaacag

SEQ ID NO: 31812 - DNA, 40 bp, Artificial Sequence
  Description of Artificial Sequence: Synthetic primer
tttcatcattgccagccatcacagtgaccagagtgccatc

SEQ ID NO: 31813 - DNA, 40 bp, Artificial Sequence
  Description of Artificial Sequence: Synthetic primer
gcatcagaaggccgaggagaagaaagtgaaagtgcaacag

SEQ ID NO: 31814 - DNA, 40 bp, Artificial Sequence
  Description of Artificial Sequence: Synthetic primer
aaaggggaaaggggaaaaggggaaggggggaaggggaaca

SEQ ID NO: 31815 - DNA, 40 bp, Artificial Sequence
  Description of Artificial Sequence: Synthetic primer
aaaggctcgagaatggaccgctaaagtggaagctattcag

SEQ ID NO: 31816 - DNA, 40 bp, Artificial Sequence
  Description of Artificial Sequence: Synthetic primer
catgtcagacagggcctccagtagacctgccaggtccccg

SEQ ID NO: 31817 - DNA, 40 bp, Artificial Sequence
  Description of Artificial Sequence: Synthetic primer
atcttcatctgatattggtagggttgttgttccattgtag

SEQ ID NO: 31818 - DNA, 40 bp, Artificial Sequence
  Description of Artificial Sequence: Synthetic primer
atgctggagtcagtggaagacggagctggtcggcccgaag

SEQ ID NO: 31819 - DNA, 40 bp, Artificial Sequence
  Description of Artificial Sequence: Synthetic primer
gttgctcttaatggcagagaggaaagtcccttattgattg

SEQ ID NO: 31820 - DNA, 40 bp, Artificial Sequence
  Description of Artificial Sequence: Synthetic primer
aaggccttccgccagctctcccacctccagcagcacacac

SEQ ID NO: 31821 - DNA, 40 bp, Artificial Sequence
  Description of Artificial Sequence: Synthetic primer
ctgcagcgtcactccctggctctgaactcccctcctccag

SEQ ID NO: 31822 - DNA, 40 bp, Artificial Sequence
  Description of Artificial Sequence: Synthetic primer
accttcttgtcgaagcaaactgaactaaacatgaaagtgc

SEQ ID NO: 31823 - DNA, 40 bp, Artificial Sequence
  Description of Artificial Sequence: Synthetic primer
caatcgtttttgttgtaaaagaattatttttcactaaaca

SEQ ID NO: 31824 - DNA, 40 bp, Artificial Sequence
  Description of Artificial Sequence: Synthetic primer
gaacataaatgctaggttttaatattctttagttctttac

SEQ ID NO: 31825 - DNA, 40 bp, Artificial Sequence
  Description of Artificial Sequence: Synthetic primer
aaaatcaggtggctgggacgttcttttgtctctgaagacc

SEQ ID NO: 31826 - DNA, 40 bp, Artificial Sequence
  Description of Artificial Sequence: Synthetic primer
gcgcgtctacagggacacagctgagccaaactggaacgag

SEQ ID NO: 31827 - DNA, 40 bp, Artificial Sequence
  Description of Artificial Sequence: Synthetic primer
ccgcacccgtgccagggccagccctggggcgccccggtcc

SEQ ID NO: 31828 - DNA, 40 bp, Artificial Sequence
  Description of Artificial Sequence: Synthetic primer
cgaggtttgtttacgtccgggcggagggcgactttatagg

SEQ ID NO: 31829 - DNA, 40 bp, Artificial Sequence
  Description of Artificial Sequence: Synthetic primer
ggccagggagagaaggaccctcctgctggagattcaagtg

SEQ ID NO: 31830 - DNA, 40 bp, Artificial Sequence
  Description of Artificial Sequence: Synthetic primer
ctcacgggtgtcctgtgaggggcttgcatttgtggtggtc

SEQ ID NO: 31831 - DNA, 40 bp, Artificial Sequence
  Description of Artificial Sequence: Synthetic primer
tttccttgtgccaggaggacgttgcgagcagccagatcac

SEQ ID NO: 31832 - DNA, 40 bp, Artificial Sequence
  Description of Artificial Sequence: Synthetic primer
taaatctgtattctgggtaacccccaggacgtttattttg

SEQ ID NO: 31833 - DNA, 40 bp, Artificial Sequence
  Description of Artificial Sequence: Synthetic primer
tcaactgttgattgcaggaataaggccttaatatgttaac

SEQ ID NO: 31834 - DNA, 40 bp, Artificial Sequence
  Description of Artificial Sequence: Synthetic primer
tttcagccgccgagcagtctcgtatttctgccagtccttc

SEQ ID NO: 31835 - DNA, 40 bp, Artificial Sequence
  Description of Artificial Sequence: Synthetic primer
cagtttggtcttctttcaggtgtaggataacttttgttcc

SEQ ID NO: 31836 - DNA, 40 bp, Artificial Sequence
  Description of Artificial Sequence: Synthetic primer
tttcttcctcgaccaaaatatggaaaccactggctcaaac

SEQ ID NO: 31837 - DNA, 40 bp, Artificial Sequence
  Description of Artificial Sequence: Synthetic primer
tccaccccgctccggactccgctttggaatggctcaaacc

SEQ ID NO: 31838 - DNA, 40 bp, Artificial Sequence
  Description of Artificial Sequence: Synthetic primer
cttccaaaagaggaaacagagtttttatcaatccattctc

SEQ ID NO: 31839 - DNA, 40 bp, Artificial Sequence
  Description of Artificial Sequence: Synthetic primer
cataaaccctcttggtaaataccgaatggacctggtgctc

SEQ ID NO: 31840 - DNA, 40 bp, Artificial Sequence
  Description of Artificial Sequence: Synthetic primer
agcaaagcaagccaaacaagggaaccacaccgaggcagcc

SEQ ID NO: 31841 - DNA, 40 bp, Artificial Sequence
  Description of Artificial Sequence: Synthetic primer
cctcctctaagtgggctgtgtggctccactcgggcagacc

SEQ ID NO: 31842 - DNA, 40 bp, Artificial Sequence
  Description of Artificial Sequence: Synthetic primer
cagctcagatgacgactcccctccagctcgttctcccaac

SEQ ID NO: 31843 - DNA, 40 bp, Artificial Sequence
  Description of Artificial Sequence: Synthetic primer
gaatgtgtgaccagaaagtggctttgacaccaagtgctac

SEQ ID NO: 31844 - DNA, 40 bp, Artificial Sequence
  Description of Artificial Sequence: Synthetic primer
aattggttatggtaaagctacacccaccacccgcctctgg

SEQ ID NO: 31845 - DNA, 40 bp, Artificial Sequence
  Description of Artificial Sequence: Synthetic primer
atgccaatgcttccattgcttcccagtttttctcccgaag

SEQ ID NO: 31846 - DNA, 40 bp, Artificial Sequence
  Description of Artificial Sequence: Synthetic primer
tgaaatgagcaggcactccttggagcaaaagcccactgac

SEQ ID NO: 31847 - DNA, 40 bp, Artificial Sequence
  Description of Artificial Sequence: Synthetic primer
taaagacccacaggccatgacctttttgatcactctgagg

SEQ ID NO: 31848 - DNA, 40 bp, Artificial Sequence
  Description of Artificial Sequence: Synthetic primer
cacaccccgacggcagtccatgacggtgaagaagggagag

SEQ ID NO: 31849 - DNA, 40 bp, Artificial Sequence
  Description of Artificial Sequence: Synthetic primer
gctgggtgcactgcacttcgctggggctagggagggtgtc

SEQ ID NO: 31850 - DNA, 40 bp, Artificial Sequence
  Description of Artificial Sequence: Synthetic primer
agatgtgtttaactgtgaggctatttaacgaatagtgtgg

SEQ ID NO: 31851 - DNA, 40 bp, Artificial Sequence
  Description of Artificial Sequence: Synthetic primer
gctgaaaattcctgaggaagatggttacaccatcaccccc

SEQ ID NO: 31852 - DNA, 40 bp, Artificial Sequence
  Description of Artificial Sequence: Synthetic primer
ttcttgtacttcattctgaacactagaaagtgttttcttc

SEQ ID NO: 31853 - DNA, 40 bp, Artificial Sequence
  Description of Artificial Sequence: Synthetic primer
cgtgaattcgttcagtggacaactggccgtgaatgtctcc

SEQ ID NO: 31854 - DNA, 40 bp, Artificial Sequence
  Description of Artificial Sequence: Synthetic primer
gggcgatggggaaggggagtggtgaaaaagggggtgtcag

SEQ ID NO: 31855 - DNA, 40 bp, Artificial Sequence
  Description of Artificial Sequence: Synthetic primer
gacagatggtagagacttccatagaattaagagggttctc

SEQ ID NO: 31856 - DNA, 40 bp, Artificial Sequence
  Description of Artificial Sequence: Synthetic primer
atccccaaggcagttgtttgtatcaaaccaggaatcaaag

SEQ ID NO: 31857 - DNA, 40 bp, Artificial Sequence
  Description of Artificial Sequence: Synthetic primer
aaataactgtccttcatttttaccacactactgatcaaac

SEQ ID NO: 31858 - DNA, 40 bp, Artificial Sequence
  Description of Artificial Sequence: Synthetic primer
gttgtagccaagacgcccccgcacggggagggttgggaag

SEQ ID NO: 31859 - DNA, 40 bp, Artificial Sequence
  Description of Artificial Sequence: Synthetic primer
ctgagttaagatctttgtccatttcttttagcatgacgag

SEQ ID NO: 31860 - DNA, 40 bp, Artificial Sequence
  Description of Artificial Sequence: Synthetic primer
tattatagaaaattcctctgcacccatatgtgaaaacaag

SEQ ID NO: 31861 - DNA, 40 bp, Artificial Sequence
  Description of Artificial Sequence: Synthetic primer
aaacaagttctagtcactctgatcttggccagcttgcttc

SEQ ID NO: 31862 - DNA, 40 bp, Artificial Sequence
  Description of Artificial Sequence: Synthetic primer
aaaacagtcaaaagttaccagatgccatctgtaggctaag

SEQ ID NO: 31863 - DNA, 40 bp, Artificial Sequence
  Description of Artificial Sequence: Synthetic primer
caggaggccctgggggtgggagaaggaatggggacggggg

SEQ ID NO: 31864 - DNA, 40 bp, Artificial Sequence
  Description of Artificial Sequence: Synthetic primer
agatgcctaccgccacccagacccccgggagctacgagag

SEQ ID NO: 31865 - DNA, 40 bp, Artificial Sequence
  Description of Artificial Sequence: Synthetic primer
ctggctttcttctcccggcggaggggggaccattccaggc

SEQ ID NO: 31866 - DNA, 40 bp, Artificial Sequence
  Description of Artificial Sequence: Synthetic primer
gcagataacagggaagaacaataacaaaagcaaaacaagc

SEQ ID NO: 31867 - DNA, 40 bp, Artificial Sequence
  Description of Artificial Sequence: Synthetic primer
gcaccccgccacccactgtggcagcttgaatttcttgagg

SEQ ID NO: 31868 - DNA, 40 bp, Artificial Sequence
  Description of Artificial Sequence: Synthetic primer
gttcatttgcatgtgttctctcttttttaaagtgcaaaac

SEQ ID NO: 31869 - DNA, 40 bp, Artificial Sequence
  Description of Artificial Sequence: Synthetic primer
tgagtatttaaagagatggggaccaaattataacctaatg

SEQ ID NO: 31870 - DNA, 40 bp, Artificial Sequence
  Description of Artificial Sequence: Synthetic primer
tgagtcatctcctgccgggtattccccatggcatctttgc

SEQ ID NO: 31871 - DNA, 40 bp, Artificial Sequence
  Description of Artificial Sequence: Synthetic primer
aagtaagtgtctacaagattatacgaaaaagagaaagtag

SEQ ID NO: 31872 - DNA, 40 bp, Artificial Sequence
  Description of Artificial Sequence: Synthetic primer
ttaattgggaactgcgcctctttcgcgtcagcagttcagg

SEQ ID NO: 31873 - DNA, 40 bp, Artificial Sequence
  Description of Artificial Sequence: Synthetic primer
gggctttggcgagtcggcggtggccggccgcttgctggaa

SEQ ID NO: 31874 - DNA, 40 bp, Artificial Sequence
  Description of Artificial Sequence: Synthetic primer
gaaatataagatcaaaagatttaggcaagcaaaagcatag

SEQ ID NO: 31875 - DNA, 40 bp, Artificial Sequence
  Description of Artificial Sequence: Synthetic primer
gctcggagccgctcccgatcctgcttcagcacagaggtca

SEQ ID NO: 31876 - DNA, 40 bp, Artificial Sequence
  Description of Artificial Sequence: Synthetic primer
ttgcttttctaaaggtcttggcaacatctgtgctttttag

SEQ ID NO: 31877 - DNA, 40 bp, Artificial Sequence
  Description of Artificial Sequence: Synthetic primer
gcaagatgtgtggttcccacagacaagagtggctccaaac

SEQ ID NO: 31878 - DNA, 40 bp, Artificial Sequence
  Description of Artificial Sequence: Synthetic primer
agagggagcgggaaggaggtcccatcagggaggaaagcag

SEQ ID NO: 31879 - DNA, 40 bp, Artificial Sequence
  Description of Artificial Sequence: Synthetic primer
catgccatcttcaaagggacctcctcctgtggccatactg

SEQ ID NO: 31880 - DNA, 40 bp, Artificial Sequence
  Description of Artificial Sequence: Synthetic primer
cccttgcatgatggaaacaccatggctgcggcggcccagc

SEQ ID NO: 31881 - DNA, 40 bp, Artificial Sequence
  Description of Artificial Sequence: Synthetic primer
ccacctggaatttgcccaggtctcgaagctgctggtctgc

SEQ ID NO: 31882 - DNA, 40 bp, Artificial Sequence
  Description of Artificial Sequence: Synthetic primer
gtctcatgatttctcactgtgtcatgattgcgccaagctc

SEQ ID NO: 31883 - DNA, 40 bp, Artificial Sequence
  Description of Artificial Sequence: Synthetic primer
tagcaccacaggctacagtatggaccctgtcacaggctac

SEQ ID NO: 31884 - DNA, 40 bp, Artificial Sequence
  Description of Artificial Sequence: Synthetic primer
ccatgcttatggccatcttaaaactggagaggcagagaac

SEQ ID NO: 31885 - DNA, 40 bp, Artificial Sequence
  Description of Artificial Sequence: Synthetic primer
gagtggcatctttcaatgttgcctccatcttggccaagag

SEQ ID NO: 31886 - DNA, 40 bp, Artificial Sequence
  Description of Artificial Sequence: Synthetic primer
tgcctatgcaaggtaccaggctcctcagaagtccttgatg

SEQ ID NO: 31887 - DNA, 40 bp, Artificial Sequence
  Description of Artificial Sequence: Synthetic primer
atgcaattcagtgttccaagtctctgtgtaaccagctcag

SEQ ID NO: 31888 - DNA, 40 bp, Artificial Sequence
  Description of Artificial Sequence: Synthetic primer
agtttactgactttacattttctcctttttcatggctctc

SEQ ID NO: 31889 - DNA, 40 bp, Artificial Sequence
  Description of Artificial Sequence: Synthetic primer
tttattttcacaaaagaaaataaaattgcagttgcaagac

SEQ ID NO: 31890 - DNA, 40 bp, Artificial Sequence
  Description of Artificial Sequence: Synthetic primer
gttgccttgtcttggctaaaggacgataattttcatctgc

SEQ ID NO: 31891 - DNA, 40 bp, Artificial Sequence
  Description of Artificial Sequence: Synthetic primer
gcccgccggcttagcttttttgcaacattttctggaaagg

SEQ ID NO: 31892 - DNA, 40 bp, Artificial Sequence
  Description of Artificial Sequence: Synthetic primer
tacatgaaacatggagatcttcgaaatttcattcgaaatg

SEQ ID NO: 31893 - DNA, 40 bp, Artificial Sequence
  Description of Artificial Sequence: Synthetic primer
tcattgcatcactgatttccatttgtcttctctccaaatc

SEQ ID NO: 31894 - DNA, 40 bp, Artificial Sequence
  Description of Artificial Sequence: Synthetic primer
agcctgtcgggagcagagggcagtggcggtggccccaaag

SEQ ID NO: 31895 - DNA, 40 bp, Artificial Sequence
  Description of Artificial Sequence: Synthetic primer
agctgcctcattatgcagcgggtcgccaggttcctggggg

SEQ ID NO: 31896 - DNA, 40 bp, Artificial Sequence
  Description of Artificial Sequence: Synthetic primer
gacaggctgtcggccgggccccggtgcgcaggcggcggcg

SEQ ID NO: 31897 - DNA, 40 bp, Artificial Sequence
  Description of Artificial Sequence: Synthetic primer
aagggtcagtgacgcacagcccagccccctcgccacagac

SEQ ID NO: 31898 - DNA, 40 bp, Artificial Sequence
  Description of Artificial Sequence: Synthetic primer
gtgaaggacgtgcgcggcttcttcttcttggggggcgtcc

SEQ ID NO: 31899 - DNA, 40 bp, Artificial Sequence
  Description of Artificial Sequence: Synthetic primer
tttatcatacatgtctctggcaagaccaaaatcagcaacc

SEQ ID NO: 31900 - DNA, 40 bp, Artificial Sequence
  Description of Artificial Sequence: Synthetic primer
gaaggaaagcgaggagctcgaggtgaacccggacccactg

SEQ ID NO: 31901 - DNA, 40 bp, Artificial Sequence
  Description of Artificial Sequence: Synthetic primer
gcattttgtctcagtagtctttcagtcaatgagccacaag

SEQ ID NO: 31902 - DNA, 40 bp, Artificial Sequence
  Description of Artificial Sequence: Synthetic primer
tcagactctgaattaagttctggttgttagtcaaagatgc

SEQ ID NO: 31903 - DNA, 40 bp, Artificial Sequence
  Description of Artificial Sequence: Synthetic primer
gtgtgtccatgtgtatgcgtgtccgtctgtctgtctagtg

SEQ ID NO: 31904 - DNA, 40 bp, Artificial Sequence
  Description of Artificial Sequence: Synthetic primer
tattatgtggactaccggagcgacagcgcagtccaagacc

SEQ ID NO: 31905 - DNA, 40 bp, Artificial Sequence
  Description of Artificial Sequence: Synthetic primer
aagagcaagatcaccgtgacatccgaggtgcctttctcca

SEQ ID NO: 31906 - DNA, 40 bp, Artificial Sequence
  Description of Artificial Sequence: Synthetic primer
tagacgaggtcaagtcgtccctggtcaacgagtcggagaa

SEQ ID NO: 31907 - DNA, 40 bp, Artificial Sequence
  Description of Artificial Sequence: Synthetic primer
ccaccaccccagcgccccgcacgcaacccccgccggcttc

SEQ ID NO: 31908 - DNA, 40 bp, Artificial Sequence
  Description of Artificial Sequence: Synthetic primer
tccccttttcacccctatttcaaatgatgtgataaaatcc

SEQ ID NO: 31909 - DNA, 40 bp, Artificial Sequence
  Description of Artificial Sequence: Synthetic primer
ggccacagcgttgtactctcccaccttcacctccctgctg

SEQ ID NO: 31910 - DNA, 40 bp, Artificial Sequence
  Description of Artificial Sequence: Synthetic primer
gggtctcttgggcttagtcccacatatcgattggcttgag

SEQ ID NO: 31911 - DNA, 40 bp, Artificial Sequence
  Description of Artificial Sequence: Synthetic primer
gagacttcccaaaagctgcccccacaagactggaggagtg

SEQ ID NO: 31912 - DNA, 40 bp, Artificial Sequence
  Description of Artificial Sequence: Synthetic primer
aaattttagtagagatacattaatgcaaaaactattattc

SEQ ID NO: 31913 - DNA, 40 bp, Artificial Sequence
  Description of Artificial Sequence: Synthetic primer
cgaaagacaaagcttcccttaatgagctaagttcaatttc

SEQ ID NO: 31914 - DNA, 40 bp, Artificial Sequence
  Description of Artificial Sequence: Synthetic primer
catcactgtatcctcctgtctggctgataacatggcgaag

SEQ ID NO: 31915 - DNA, 40 bp, Artificial Sequence
  Description of Artificial Sequence: Synthetic primer
gaagttaaacgatgttgcatgagaaaagttagccagatac

SEQ ID NO: 31916 - DNA, 40 bp, Artificial Sequence
  Description of Artificial Sequence: Synthetic primer
gtggtttataagacgggagaaaatagcacctcacttccag

SEQ ID NO: 31917 - DNA, 40 bp, Artificial Sequence
  Description of Artificial Sequence: Synthetic primer
ccacagcaccaaggtggcctttgaggagggaactgttagg

SEQ ID NO: 31918 - DNA, 40 bp, Artificial Sequence
  Description of Artificial Sequence: Synthetic primer
tccaggtctcgaagcccacgctccatagaggaaatttttg

SEQ ID NO: 31919 - DNA, 40 bp, Artificial Sequence
  Description of Artificial Sequence: Synthetic primer
caggagaaatttcttttagttgctctctgcctcgctctgc

SEQ ID NO: 31920 - DNA, 40 bp, Artificial Sequence
  Description of Artificial Sequence: Synthetic primer
tcagcaactaccccctccctgcctatgtccgctggcagaa

SEQ ID NO: 31921 - DNA, 40 bp, Artificial Sequence
  Description of Artificial Sequence: Synthetic primer
cagatattaaaaccgaaaggatacagagatgcttacacag

SEQ ID NO: 31922 - DNA, 40 bp, Artificial Sequence
  Description of Artificial Sequence: Synthetic primer
ttgcgacaggcatctgataaagatgatagacctttccaag

SEQ ID NO: 31923 - DNA, 40 bp, Artificial Sequence
  Description of Artificial Sequence: Synthetic primer
tgaagttacagttgtaactcaaatactccagtaagcttgg

SEQ ID NO: 31924 - DNA, 40 bp, Artificial Sequence
  Description of Artificial Sequence: Synthetic primer
cacttcatgaggctccagcttaattttaggaataatggtc

SEQ ID NO: 31925 - DNA, 40 bp, Artificial Sequence
  Description of Artificial Sequence: Synthetic primer
aattaaatactgtggttgcctctatgtgctgtttttcctc

SEQ ID NO: 31926 - DNA, 40 bp, Artificial Sequence
  Description of Artificial Sequence: Synthetic primer
cccatacgacagagcttttaactggtgccttccctgtacc

SEQ ID NO: 31927 - DNA, 40 bp, Artificial Sequence
  Description of Artificial Sequence: Synthetic primer
aacagagctgtgaggaactcaagagtgacttaaacacaaa

SEQ ID NO: 31928 - DNA, 40 bp, Artificial Sequence
  Description of Artificial Sequence: Synthetic primer
ccggagcagactgcgcggccactccccgccaggtcagccc

SEQ ID NO: 31929 - DNA, 40 bp, Artificial Sequence
  Description of Artificial Sequence: Synthetic primer
tgtattgaatttttactcccttctagtaatttgggaatgc

SEQ ID NO: 31930 - DNA, 40 bp, Artificial Sequence
  Description of Artificial Sequence: Synthetic primer
tttctgtttcactcattaaagcaaacatattatgatacac

SEQ ID NO: 31931 - DNA, 40 bp, Artificial Sequence
  Description of Artificial Sequence: Synthetic primer
gatgtcccgcttgcacttgtgctcaaggccctcacggtag

SEQ ID NO: 31932 - DNA, 40 bp, Artificial Sequence
  Description of Artificial Sequence: Synthetic primer
ctggggagatttttgaggtcttcagggtctggcagaggag

SEQ ID NO: 31933 - DNA, 40 bp, Artificial Sequence
  Description of Artificial Sequence: Synthetic primer
ccacgactgaagcaagagctacaacaggctcggtggttgg

SEQ ID NO: 31934 - DNA, 40 bp, Artificial Sequence
  Description of Artificial Sequence: Synthetic primer
gaagcatcacgttccggcgggaattctgggcagacacagc

SEQ ID NO: 31935 - DNA, 40 bp, Artificial Sequence
  Description of Artificial Sequence: Synthetic primer
cagctgtcttatggctatgatgagaaatcaaccggaggaa

SEQ ID NO: 31936 - DNA, 40 bp, Artificial Sequence
  Description of Artificial Sequence: Synthetic primer
caggaatgaagactatgacaagcaggaggagaagcagcag

SEQ ID NO: 31937 - DNA, 40 bp, Artificial Sequence
  Description of Artificial Sequence: Synthetic primer
cttcctgcaggtaggcctcgaattgtgcatcgatgaattc

SEQ ID NO: 31938 - DNA, 40 bp, Artificial Sequence
  Description of Artificial Sequence: Synthetic primer
ggactgttcgtgccactgggaacgggagatgcagacactg

SEQ ID NO: 31939 - DNA, 40 bp, Artificial Sequence
  Description of Artificial Sequence: Synthetic primer
ttagctgaataggtttctgaactggcccttttcatagctg

SEQ ID NO: 31940 - DNA, 40 bp, Artificial Sequence
  Description of Artificial Sequence: Synthetic primer
agtttacaggtctatacttaagggaaaagttgcaagaatg

SEQ ID NO: 31941 - DNA, 40 bp, Artificial Sequence
  Description of Artificial Sequence: Synthetic primer
gggactcatctttgcccaatcttgttaatgccatttgatg

SEQ ID NO: 31942 - DNA, 40 bp, Artificial Sequence
  Description of Artificial Sequence: Synthetic primer
cccaacttttcctccaactcgcgctcgggagctggcgagg

SEQ ID NO: 31943 - DNA, 40 bp, Artificial Sequence
  Description of Artificial Sequence: Synthetic primer
gtatatacatgtttaggttttacaggaaacacaggagtag

SEQ ID NO: 31944 - DNA, 40 bp, Artificial Sequence
  Description of Artificial Sequence: Synthetic primer
cttagcagagactgccctaacatctggatcatccccttcc

SEQ ID NO: 31945 - DNA, 40 bp, Artificial Sequence
  Description of Artificial Sequence: Synthetic primer
gcagctgggcacgcaggccctggtggagctctttgaatcc

SEQ ID NO: 31946 - DNA, 40 bp, Artificial Sequence
  Description of Artificial Sequence: Synthetic primer
attgacagcatatatgagatcctataatccagtctgacac

SEQ ID NO: 31947 - DNA, 40 bp, Artificial Sequence
  Description of Artificial Sequence: Synthetic primer
cacacgcgcgggcgcccgctcggtccggccgcctcctccc

SEQ ID NO: 31948 - DNA, 40 bp, Artificial Sequence
  Description of Artificial Sequence: Synthetic primer
tcactgcagacacagaaccttccatgtccaggcaggaagg

SEQ ID NO: 31949 - DNA, 40 bp, Artificial Sequence
  Description of Artificial Sequence: Synthetic primer
gctcatggcctgagccattctcaggccacgatgaaagtgg

SEQ ID NO: 31950 - DNA, 40 bp, Artificial Sequence
  Description of Artificial Sequence: Synthetic primer
caccagatattgttcttcgaagtgaccagaggccctccac

SEQ ID NO: 31951 - DNA, 40 bp, Artificial Sequence
  Description of Artificial Sequence: Synthetic primer
acttgcctggctatcctggggtgccagtcccactgaatcc

SEQ ID NO: 31952 - DNA, 40 bp, Artificial Sequence
  Description of Artificial Sequence: Synthetic primer
tattgatggtgatttgtgctaccatttactcgtttattta

SEQ ID NO: 31953 - DNA, 40 bp, Artificial Sequence
  Description of Artificial Sequence: Synthetic primer
attgcattcccttagaaaaatggagaactgtttatgtacc

SEQ ID NO: 31954 - DNA, 40 bp, Artificial Sequence
  Description of Artificial Sequence: Synthetic primer
ggtttcttgcaaattccacaaggccggttttgtcagagac

SEQ ID NO: 31955 - DNA, 40 bp, Artificial Sequence
  Description of Artificial Sequence: Synthetic primer
cactcactctcagctgtgtgctgggcagccatggcctctg

SEQ ID NO: 31956 - DNA, 40 bp, Artificial Sequence
  Description of Artificial Sequence: Synthetic primer
gcttcttttgtatctcgatcttcaccgctgtcaggcaatg

SEQ ID NO: 31957 - DNA, 40 bp, Artificial Sequence
  Description of Artificial Sequence: Synthetic primer
tgatgggttacaggtcatattcggtaccatgctggtctgg

SEQ ID NO: 31958 - DNA, 40 bp, Artificial Sequence
  Description of Artificial Sequence: Synthetic primer
gtatactctcgtacagcttgttcaaatccaaaggcttctc

SEQ ID NO: 31959 - DNA, 40 bp, Artificial Sequence
  Description of Artificial Sequence: Synthetic primer
taccccactttggtgaagctgccttttgcggggcaggatg

SEQ ID NO: 31960 - DNA, 40 bp, Artificial Sequence
  Description of Artificial Sequence: Synthetic primer
gctgagggcaggtgggggtatttccttctcaattctgctc

SEQ ID NO: 31961 - DNA, 40 bp, Artificial Sequence; identical to SEQ ID NO: 29395
  Description of Artificial Sequence: Synthetic primer

SEQ ID NO: 31962 - DNA, 40 bp, Artificial Sequence
  Description of Artificial Sequence: Synthetic primer
taggttattggtcaaggataaattggtcaaggataaattc

SEQ ID NO: 31963 - DNA, 40 bp, Artificial Sequence
  Description of Artificial Sequence: Synthetic primer
ccaaccgcaaccattgacgccatgtcgggttattcgagtg

SEQ ID NO: 31964 - DNA, 40 bp, Artificial Sequence
  Description of Artificial Sequence: Synthetic primer
tgtgttgagttgaagattgtcatggaataaagatcacacc

SEQ ID NO: 31965 - DNA, 40 bp, Artificial Sequence
  Description of Artificial Sequence: Synthetic primer
gacttctcaaggggcttgctgtgttctggtcctgtggttg

SEQ ID NO: 31966 - DNA, 40 bp, Artificial Sequence
  Description of Artificial Sequence: Synthetic primer
ctggccctggttggaaggctgttgcatacgaggcccatag

SEQ ID NO: 31967 - DNA, 40 bp, Artificial Sequence
  Description of Artificial Sequence: Synthetic primer
gtcagaatactacctggcaatcttaggctgaccccaggag

SEQ ID NO: 31968 - DNA, 40 bp, Artificial Sequence
  Description of Artificial Sequence: Synthetic primer
tttgtgacctctcccgccagaggaggctgctgtcacttta

SEQ ID NO: 31969 - DNA, 40 bp, Artificial Sequence
  Description of Artificial Sequence: Synthetic primer
ggccctgaaagagaccaagctggaaagcacgtcccccaag

SEQ ID NO: 31970 - DNA, 40 bp, Artificial Sequence
  Description of Artificial Sequence: Synthetic primer
acacaaggctggactgctcgccctgcagggctggctgagc

SEQ ID NO: 31971 - DNA, 40 bp, Artificial Sequence
  Description of Artificial Sequence: Synthetic primer
ctgctaaggacgcctcttcctgtggtattgggtggtgttc

SEQ ID NO: 31972 - DNA, 40 bp, Artificial Sequence
  Description of Artificial Sequence: Synthetic primer
cagtagtattggcattcccattgctgtgcctacaccttcg

SEQ ID NO: 31973 - DNA, 40 bp, Artificial Sequence
  Description of Artificial Sequence: Synthetic primer
ttcttgtaaacttaaagcctagaagtattccaaagcaagg

SEQ ID NO: 31974 - DNA, 40 bp, Artificial Sequence
  Description of Artificial Sequence: Synthetic primer
tactcctctcttcccttggtttaccccaggctctcagact

SEQ ID NO: 31975 - DNA, 40 bp, Artificial Sequence
  Description of Artificial Sequence: Synthetic primer
agtaccctctatccccggccctacaattgctcagagatgc

SEQ ID NO: 31976 - DNA, 40 bp, Artificial Sequence
  Description of Artificial Sequence: Synthetic primer
tcatcgctcccgccgccaatcgccccgcaccaggggtctc

SEQ ID NO: 31977 - DNA, 40 bp, Artificial Sequence
  Description of Artificial Sequence: Synthetic primer
ttaggctgtgtcagtgaatgcttctgtccaactaactttc

SEQ ID NO: 31978 - DNA, 40 bp, Artificial Sequence
  Description of Artificial Sequence: Synthetic primer
atccgactggggtgactccgggggagttacagctgagctg

SEQ ID NO: 31979 - DNA, 40 bp, Artificial Sequence
  Description of Artificial Sequence: Synthetic primer
agtctttccattaatacctgattctctgccaacaaactac

SEQ ID NO: 31980 - DNA, 40 bp, Artificial Sequence
  Description of Artificial Sequence: Synthetic primer
acgcctcagccgcttggggcccgcacggaccctctacttc

SEQ ID NO: 31981 - DNA, 40 bp, Artificial Sequence
  Description of Artificial Sequence: Synthetic primer
cttaactgtcaaatttagaagtgcaacagtgggtcttcag

SEQ ID NO: 31982 - DNA, 40 bp, Artificial Sequence
  Description of Artificial Sequence: Synthetic primer
ttatccaagtaaatgtgtatttctatgaagaatgtaggtg

SEQ ID NO: 31983 - DNA, 40 bp, Artificial Sequence
  Description of Artificial Sequence: Synthetic primer
gcacagacttcaaccactataatctgtccagctcccatgc

SEQ ID NO: 31984 - DNA, 40 bp, Artificial Sequence
  Description of Artificial Sequence: Synthetic primer
gaaccggaacatgacagacagcacttggccttttaatttc

SEQ ID NO: 31985 - DNA, 40 bp, Artificial Sequence
  Description of Artificial Sequence: Synthetic primer
gagttactggggttatttttgttttaaataaaaataagtg

SEQ ID NO: 31986 - DNA, 40 bp, Artificial Sequence
  Description of Artificial Sequence: Synthetic primer
cacctccagaggctctgctttgatcactggcagctgagtc

SEQ ID NO: 31987 - DNA, 40 bp, Artificial Sequence
  Description of Artificial Sequence: Synthetic primer
ctcctttcagatcaacaacaccaaagggaattgtggaaac

SEQ ID NO: 31988 - DNA, 40 bp, Artificial Sequence
  Description of Artificial Sequence: Synthetic primer
ccagcagctccctagatgcaactggtgactggatgtgaag

SEQ ID NO: 31989 - DNA, 40 bp, Artificial Sequence
  Description of Artificial Sequence: Synthetic primer
gtgtgactgtcatgtgaaagttaccccatttctcatctta

SEQ ID NO: 31990 - DNA, 40 bp, Artificial Sequence
  Description of Artificial Sequence: Synthetic primer
gagaaaccaacaaatgtcaggaaaagaaaattcattaaca

SEQ ID NO: 31991 - DNA, 40 bp, Artificial Sequence
  Description of Artificial Sequence: Synthetic primer
tccatttaccatgaatgagggaccttttgaagaaaaactg

SEQ ID NO: 31992 - DNA, 40 bp, Artificial Sequence
  Description of Artificial Sequence: Synthetic primer
tctacgagctcaaaagccaacccttaccccttcgctcaag

SEQ ID NO: 31993 - DNA, 40 bp, Artificial Sequence
  Description of Artificial Sequence: Synthetic primer
gtcactaagctgggaccccaactcgcttatcttcagagtc

SEQ ID NO: 31994 - DNA, 40 bp, Artificial Sequence
  Description of Artificial Sequence: Synthetic primer
ctaaagtcccaacagaacacaattatctcccgtaacaagg

SEQ ID NO: 31995 - DNA, 40 bp, Artificial Sequence
  Description of Artificial Sequence: Synthetic primer
gtcaaatgaatgtttaaaagccactgtcacctcatgaaac

SEQ ID NO: 31996 - DNA, 40 bp, Artificial Sequence
  Description of Artificial Sequence: Synthetic primer
agtacaaaccagagaaaataaatcaaacaaggctgcatag

SEQ ID NO: 31997 - DNA, 40 bp, Artificial Sequence
  Description of Artificial Sequence: Synthetic primer
ctgaaggacatgattcagactgtcccggacccagcagctc

SEQ ID NO: 31998 - DNA, 40 bp, Artificial Sequence
  Description of Artificial Sequence: Synthetic primer
caaaagcatagatctgtcgctccaaatttgccaatgtttc

SEQ ID NO: 31999 - DNA, 40 bp, Artificial Sequence
  Description of Artificial Sequence: Synthetic primer
tacctgatgggtttagatgtttttggtgcttgggaagaag

SEQ ID NO: 32000 - DNA, 40 bp, Artificial Sequence
  Description of Artificial Sequence: Synthetic primer
agaagagagagactaaagcatgtcaaacttgcttcctgag

SEQ ID NO: 32001 - DNA, 40 bp, Artificial Sequence
  Description of Artificial Sequence: Synthetic primer
ggaggcacatttacgcttagtggtgctggggaggttgcag

SEQ ID NO: 32002 - DNA, 40 bp, Artificial Sequence
  Description of Artificial Sequence: Synthetic primer
ccaaccttcaaagaaacttgaagctttgtaggtgagatgc

SEQ ID NO: 32003 - DNA, 40 bp, Artificial Sequence
  Description of Artificial Sequence: Synthetic primer
ttaaaatcccttgaaatgatgatatcagggttaaaattac

SEQ ID NO: 32004 - DNA, 40 bp, Artificial Sequence
  Description of Artificial Sequence: Synthetic primer
aaggagacccaagcactagtattggcccccaccagagaac

SEQ ID NO: 32005 - DNA, 40 bp, Artificial Sequence
  Description of Artificial Sequence: Synthetic primer
tgcaggaagaggagaggtggtgtgagagcctggagaagac

SEQ ID NO: 32006 - DNA, 40 bp, Artificial Sequence
  Description of Artificial Sequence: Synthetic primer
aagaggaagaagaaagaggaggcggcccggaggaaacagg

SEQ ID NO: 32007 - DNA, 40 bp, Artificial Sequence
  Description of Artificial Sequence: Synthetic primer
gtagcagttgcttcttcctgtttcaatggtttgctatgtt

SEQ ID NO: 32008 - DNA, 40 bp, Artificial Sequence
  Description of Artificial Sequence: Synthetic primer
ggaagagcccgtgcgctcagaggtcccggggtacgcaaag

SEQ ID NO: 32009 - DNA, 40 bp, Artificial Sequence
  Description of Artificial Sequence: Synthetic primer
gaatatcgatggccttttaaaggtcaggcagtgaaaaaac

SEQ ID NO: 32010 - DNA, 40 bp, Artificial Sequence
  Description of Artificial Sequence: Synthetic primer
cccaggatctctttccccaaggacccagccctcgcctctg

SEQ ID NO: 32011 - DNA, 40 bp, Artificial Sequence
  Description of Artificial Sequence: Synthetic primer
gggtggggggaattaaatacatattcaagtctttccaaag

SEQ ID NO: 32012 - DNA, 40 bp, Artificial Sequence
  Description of Artificial Sequence: Synthetic primer
taagtgacatcttaaaatctcaaatgcgttctttccttgg

SEQ ID NO: 32013 - DNA, 40 bp, Artificial Sequence
  Description of Artificial Sequence: Synthetic primer
tgaggaagttacatctttggcaaagtctctcatcaaatcc

SEQ ID NO: 32014 - DNA, 40 bp, Artificial Sequence
  Description of Artificial Sequence: Synthetic primer
ccaatccagaatgctggatttcaaaagcttctgctccttg

SEQ ID NO: 32015 - DNA, 40 bp, Artificial Sequence
  Description of Artificial Sequence: Synthetic primer
agggtagaaacaggtccctccattaaagcaggtggttgag

SEQ ID NO: 32016 - DNA, 40 bp, Artificial Sequence
  Description of Artificial Sequence: Synthetic primer
caggcaatccgaggactatgagagcttctcctgtgtctgc

SEQ ID NO: 32017 - DNA, 40 bp, Artificial Sequence
  Description of Artificial Sequence: Synthetic primer
tttcatctgtgagagtgatcagaccaagccactttccaac

SEQ ID NO: 32018 - DNA, 40 bp, Artificial Sequence
  Description of Artificial Sequence: Synthetic primer
catcttaggagttggaagtggagaaatcaaagtagcagtg

SEQ ID NO: 32019 - DNA, 40 bp, Artificial Sequence
  Description of Artificial Sequence: Synthetic primer
agcagccagcctggccaaagacagacgcttcagtctcagg

SEQ ID NO: 32020 - DNA, 40 bp, Artificial Sequence
  Description of Artificial Sequence: Synthetic primer
cattggtttccccaaaactgccttccctggaagccccaac

SEQ ID NO: 32021 - DNA, 40 bp, Artificial Sequence
  Description of Artificial Sequence: Synthetic primer
gaatagaccatcacaggctcttcacccttggcaggtggac

SEQ ID NO: 32022 - DNA, 40 bp, Artificial Sequence
  Description of Artificial Sequence: Synthetic primer
attgtccttgagaccctacatgtgcagtttggctcatctc

SEQ ID NO: 32023 - DNA, 40 bp, Artificial Sequence
  Description of Artificial Sequence: Synthetic primer
agggtgtaatagaagtttgagtgatcattcggtttgtagc

SEQ ID NO: 32024 - DNA, 40 bp, Artificial Sequence
  Description of Artificial Sequence: Synthetic primer
ataagaacttcttgtcagccagaggattgaaggagaagtc

SEQ ID NO: 32025 - DNA, 40 bp, Artificial Sequence
  Description of Artificial Sequence: Synthetic primer
gtaagactagaggctggccctcccagataacagagaaaag

SEQ ID NO: 32026 - DNA, 40 bp, Artificial Sequence
  Description of Artificial Sequence: Synthetic primer
tctggaacaggccgtggtactgattatgaagtttgcattg

SEQ ID NO: 32027 - DNA, 40 bp, Artificial Sequence
  Description of Artificial Sequence: Synthetic primer
cattccaaagaggctggggcgattctcctgaggtgacagg

SEQ ID NO: 32028 - DNA, 40 bp, Artificial Sequence
  Description of Artificial Sequence: Synthetic primer
atgctcagcttcccagaggtggagctgggaggagagcaac

SEQ ID NO: 32029 - DNA, 40 bp, Artificial Sequence
  Description of Artificial Sequence: Synthetic primer
ctgtgcatgaacccacatgagcaaatcttaagttaatcac

SEQ ID NO: 32030 - DNA, 40 bp, Artificial Sequence
  Description of Artificial Sequence: Synthetic primer
cctgctacactaatttgtacactaatttatttctttagtc

SEQ ID NO: 32031 - DNA, 40 bp, Artificial Sequence
  Description of Artificial Sequence: Synthetic primer
aatctgtataaaattacaacaaaaccaataaatttcaagc

SEQ ID NO: 32032 - DNA, 40 bp, Artificial Sequence
  Description of Artificial Sequence: Synthetic primer
tattagaaaatgaagaaatcctggggtgcatcttgctctc

SEQ ID NO: 32033 - DNA, 40 bp, Artificial Sequence
  Description of Artificial Sequence: Synthetic primer
cctgattacaggggtggggcctgatcacatctcctcttcc

SEQ ID NO: 32034 - DNA, 40 bp, Artificial Sequence
  Description of Artificial Sequence: Synthetic primer
ccgggaagaggagtgggacccagagtacacacccaaaagc

SEQ ID NO: 32035 - DNA, 40 bp, Artificial Sequence
  Description of Artificial Sequence: Synthetic primer
gccgccgcatctcttcttcacggcgcctgcgctcttcctc

SEQ ID NO: 32036 - DNA, 40 bp, Artificial Sequence
  Description of Artificial Sequence: Synthetic primer
tattttccattgaaagggttttcccactgccacctccaac

SEQ ID NO: 32037 - DNA, 40 bp, Artificial Sequence
  Description of Artificial Sequence: Synthetic primer
ccccaacccggctttccagctccgggccttgaccactagg

SEQ ID NO: 32038 - DNA, 40 bp, Artificial Sequence
  Description of Artificial Sequence: Synthetic primer
agactcttgaacagaatctggaataaccttaggggtaaag

SEQ ID NO: 32039 - DNA, 40 bp, Artificial Sequence
  Description of Artificial Sequence: Synthetic primer
gtccggcccccacagttatgggccagccagagagaccaac

SEQ ID NO: 32040 - DNA, 40 bp, Artificial Sequence
  Description of Artificial Sequence: Synthetic primer
cacaaaaacagagtgagggctcaggaaaacaaaacaaagg

SEQ ID NO: 32041 - DNA, 40 bp, Artificial Sequence
  Description of Artificial Sequence: Synthetic primer
tcaggccacccgaacccgagcccccggagccgctgccgcc

SEQ ID NO: 32042 - DNA, 40 bp, Artificial Sequence
  Description of Artificial Sequence: Synthetic primer
cccccactctctgggctgcctaccatggcaacctcgagtc

SEQ ID NO: 32043 - DNA, 40 bp, Artificial Sequence
  Description of Artificial Sequence: Synthetic primer
aacataaaataaattatgatgagccatttttagcctcttg

SEQ ID NO: 32044 - DNA, 40 bp, Artificial Sequence
  Description of Artificial Sequence: Synthetic primer
ataacttttttgcttttttacatgcgatttgtaagcttag

SEQ ID NO: 32045 - DNA, 40 bp, Artificial Sequence
  Description of Artificial Sequence: Synthetic primer
accctggatttatgcccaagaagggggaccttggcctttc

SEQ ID NO: 32046 - DNA, 40 bp, Artificial Sequence
  Description of Artificial Sequence: Synthetic primer
gttatttccctaagtgttattttgacattttgttttggaa

SEQ ID NO: 32047 - DNA, 40 bp, Artificial Sequence
  Description of Artificial Sequence: Synthetic primer
ccagcattcccttgggacacaatggggggcagctgggcag

SEQ ID NO: 32048 - DNA, 40 bp, Artificial Sequence
  Description of Artificial Sequence: Synthetic primer
attcaaatgtctaaattttacatggtaatgcaaaagaaaa

SEQ ID NO: 32049 - DNA, 40 bp, Artificial Sequence
  Description of Artificial Sequence: Synthetic primer
accgagggggtggcttcctgccacagcgccgcacctgagc

SEQ ID NO: 32050 - DNA, 40 bp, Artificial Sequence
  Description of Artificial Sequence: Synthetic primer
atgtgtttcccaggttgcttagacctgtggctcccttttc

SEQ ID NO: 32051 - DNA, 40 bp, Artificial Sequence
  Description of Artificial Sequence: Synthetic primer
tccatcttatgaggatcccagccagggctggctatgggag

SEQ ID NO: 32052 - DNA, 40 bp, Artificial Sequence
  Description of Artificial Sequence: Synthetic primer
atctgccatgatgcctttatccagggagcgcaaggacagg

SEQ ID NO: 32053 - DNA, 40 bp, Artificial Sequence
  Description of Artificial Sequence: Synthetic primer
ccccactggggcgttagagagacccgcggcccctccaggg

SEQ ID NO: 32054 - DNA, 40 bp, Artificial Sequence
  Description of Artificial Sequence: Synthetic primer
atacagccaaggactgggccccaactttcaggaaaaagac

SEQ ID NO: 32055 - DNA, 40 bp, Artificial Sequence
  Description of Artificial Sequence: Synthetic primer
cattcattgtttcagttttcttcatcagttcttcatgctg

SEQ ID NO: 32056 - DNA, 40 bp, Artificial Sequence
  Description of Artificial Sequence: Synthetic primer
ttcatcaccagtcctgctcttttccaggtcaatgttagcc

SEQ ID NO: 32057 - DNA, 40 bp, Artificial Sequence
  Description of Artificial Sequence: Synthetic primer
tggacgtttcttcccattccctcctcccaaatgcacttcc

SEQ ID NO: 32058 - DNA, 40 bp, Artificial Sequence
  Description of Artificial Sequence: Synthetic primer
cgacctgagcacccagcacccccgcctgagaagcatctgg

SEQ ID NO: 32059 - DNA, 40 bp, Artificial Sequence
  Description of Artificial Sequence: Synthetic primer
atatctgtgtataaaacttttgcaaaaagttaattctgcc

SEQ ID NO: 32060 - DNA, 40 bp, Artificial Sequence
  Description of Artificial Sequence: Synthetic primer
cgattcaacattaacgacaggatcaaggaactgggcactc

SEQ ID NO: 32061 - DNA, 40 bp, Artificial Sequence
  Description of Artificial Sequence: Synthetic primer
cagcctacatgacttccaaggggacctggggccagataag

SEQ ID NO: 32062 - DNA, 40 bp, Artificial Sequence
  Description of Artificial Sequence: Synthetic primer
aaaaaaattggcagtcctagaagacgaaaaatctggaaag

SEQ ID NO: 32063 - DNA, 40 bp, Artificial Sequence
  Description of Artificial Sequence: Synthetic primer
accgaccagcagcatcgacctcagaggactctggctcttc

SEQ ID NO: 32064 - DNA, 40 bp, Artificial Sequence
  Description of Artificial Sequence: Synthetic primer
aatgaacatgttgaaggccagagcaacctagagtctgagc

SEQ ID NO: 32065 - DNA, 40 bp, Artificial Sequence
  Description of Artificial Sequence: Synthetic primer
caacataaaatagctgaaatggtagcacttatggaaaaac

SEQ ID NO: 32066 - DNA, 40 bp, Artificial Sequence
  Description of Artificial Sequence: Synthetic primer
cagctcctgcttctcctcctgtgcatctgggaccctgacc

SEQ ID NO: 32067 - DNA, 40 bp, Artificial Sequence
  Description of Artificial Sequence: Synthetic primer
ttgccaagtaagagtggtggcctatttcagctgctttgac

SEQ ID NO: 32068 - DNA, 40 bp, Artificial Sequence
  Description of Artificial Sequence: Synthetic primer
tatgtgtcccctagtggttatcgtttagttagtgaaacag

SEQ ID NO: 32069 - DNA, 40 bp, Artificial Sequence
  Description of Artificial Sequence: Synthetic primer
gagaatctaatctgtctagcaagcaaaccactctgactgc

SEQ ID NO: 32070 - DNA, 40 bp, Artificial Sequence
  Description of Artificial Sequence: Synthetic primer
accgactttttcttcagcagcagccatctcgtccttggtc

SEQ ID NO: 32071 - DNA, 40 bp, Artificial Sequence
  Description of Artificial Sequence: Synthetic primer
ctgtaaatcttaacatcaagacagggggaagagtttatgg

SEQ ID NO: 32072 - DNA, 40 bp, Artificial Sequence
  Description of Artificial Sequence: Synthetic primer
tcacttctgtttgcacagagaaaggcacctggagagaaag

SEQ ID NO: 32073 - DNA, 40 bp, Artificial Sequence
  Description of Artificial Sequence: Synthetic primer
agcattgacctggaactggaagttgaccccttgaatgtgg

SEQ ID NO: 32074 - DNA, 40 bp, Artificial Sequence
  Description of Artificial Sequence: Synthetic primer
gaagaacgagaaaagattttgtcttccatggggaatgatg

SEQ ID NO: 32075 - DNA, 40 bp, Artificial Sequence
  Description of Artificial Sequence: Synthetic primer
catctaccaagtgggcggagtggccttctgtggacgaatc

SEQ ID NO: 32076 - DNA, 40 bp, Artificial Sequence
  Description of Artificial Sequence: Synthetic primer
atgttctgaggaacaatgcttaaaattatacaagggttta

SEQ ID NO: 32077 - DNA, 40 bp, Artificial Sequence
  Description of Artificial Sequence: Synthetic primer
ttctgcatctgcccacctggattctatggagtgaactgtg

SEQ ID NO: 32078 - DNA, 40 bp, Artificial Sequence
  Description of Artificial Sequence: Synthetic primer
cccacctgcctgagggtgcagcttgtgcagaggtgttgag

SEQ ID NO: 32079 - DNA, 40 bp, Artificial Sequence
  Description of Artificial Sequence: Synthetic primer
gaagagactatgtatcacacaagcaaggtttctgaattac

SEQ ID NO: 32080 - DNA, 40 bp, Artificial Sequence
  Description of Artificial Sequence: Synthetic primer
attaccgaagtattaatatttagcttcctttctagaaaac

SEQ ID NO: 32081 - DNA, 40 bp, Artificial Sequence
  Description of Artificial Sequence: Synthetic primer
gtttattttagaattcaggtgatgtctggcttgtgaggag

SEQ ID NO: 32082 - DNA, 40 bp, Artificial Sequence
  Description of Artificial Sequence: Synthetic primer
ccctatgactccacgtgggagctgccgcgggaccagcttg

SEQ ID NO: 32083 - DNA, 40 bp, Artificial Sequence
  Description of Artificial Sequence: Synthetic primer
ctggtgtgcacacgagtatatttatgttgttgatcctctc

SEQ ID NO: 32084 - DNA, 40 bp, Artificial Sequence
  Description of Artificial Sequence: Synthetic primer
tatcacctgcaaccgctgcgccaaaggctaccagcagagc

SEQ ID NO: 32085 - DNA, 40 bp, Artificial Sequence
  Description of Artificial Sequence: Synthetic primer
tcagcaggaagatctcaatggggcagcctccacccctctc

SEQ ID NO: 32086 - DNA, 40 bp, Artificial Sequence
  Description of Artificial Sequence: Synthetic primer
atggtcttgaacttcaggatctgcatcactggcccgaaga

SEQ ID NO: 32087 - DNA, 40 bp, Artificial Sequence
  Description of Artificial Sequence: Synthetic primer
gattgtgttggagagtgtaggccgtggttcttggctagag

SEQ ID NO: 32088 - DNA, 40 bp, Artificial Sequence
  Description of Artificial Sequence: Synthetic primer
tcccctctttccttctgccggtccttttggctggggtctg

SEQ ID NO: 32089 - DNA, 40 bp, Artificial Sequence
  Description of Artificial Sequence: Synthetic primer
tggcagtggcttcggaacatttaacagattctcttctttc

SEQ ID NO: 32090 - DNA, 40 bp, Artificial Sequence
  Description of Artificial Sequence: Synthetic primer
gcgctcgctgcccgcgctcccaaaagccccggcggggcgg

SEQ ID NO: 32091 - DNA, 40 bp, Artificial Sequence
  Description of Artificial Sequence: Synthetic primer
gaaggcacccgatatttgtggttctggccttgcagccttc

SEQ ID NO: 32092 - DNA, 40 bp, Artificial Sequence
  Description of Artificial Sequence: Synthetic primer
ctccatcagtgacctgaaggaggtgccgcggaaaaacatc

SEQ ID NO: 32093 - DNA, 40 bp, Artificial Sequence
  Description of Artificial Sequence: Synthetic primer
tacctctacccgtgtttcacaaatagcctgaggatccaac

SEQ ID NO: 32094 - DNA, 40 bp, Artificial Sequence
  Description of Artificial Sequence: Synthetic primer
attgtcggtctgagccacttttttgcagtgtctcacatgg

SEQ ID NO: 32095 - DNA, 40 bp, Artificial Sequence
  Description of Artificial Sequence: Synthetic primer
tccagaacgtccagcaagttgaatacagctccatcagagg

SEQ ID NO: 32096 - DNA, 40 bp, Artificial Sequence
  Description of Artificial Sequence: Synthetic primer
caaatcgtgaaaagaaaccagaagaactcctctcttgtgc

SEQ ID NO: 32097 - DNA, 40 bp, Artificial Sequence
  Description of Artificial Sequence: Synthetic primer
agcacttgttcttttaataaaagaatgttttgcaaaaaaa

SEQ ID NO: 32098 - DNA, 40 bp, Artificial Sequence
  Description of Artificial Sequence: Synthetic primer
tacacccccacctcctcaaaagggctatccccagcatatc

SEQ ID NO: 32099 - DNA, 40 bp, Artificial Sequence
  Description of Artificial Sequence: Synthetic primer
aagggtggtttccacaccctctgttagggaagccacaatc

SEQ ID NO: 32100 - DNA, 40 bp, Artificial Sequence
  Description of Artificial Sequence: Synthetic primer
ttgtccttcttggtggacgacgcagccgccgacgacgtag

SEQ ID NO: 32101 - DNA, 40 bp, Artificial Sequence
  Description of Artificial Sequence: Synthetic primer
aaaacacaccctacacactagactccgaacactggtaatc

SEQ ID NO: 32102 - DNA, 40 bp, Artificial Sequence
  Description of Artificial Sequence: Synthetic primer
ggatattcccacagtcatcactgttgttattgtctgaatc

SEQ ID NO: 32103 - DNA, 40 bp, Artificial Sequence
  Description of Artificial Sequence: Synthetic primer
cacgttggccaggtgccggttgggccgcatgtgcctctgc

SEQ ID NO: 32104 - DNA, 40 bp, Artificial Sequence
  Description of Artificial Sequence: Synthetic primer
atgtggagccccgaactgcagtggcttcttgggtgtaagg

SEQ ID NO: 32105 - DNA, 40 bp, Artificial Sequence
  Description of Artificial Sequence: Synthetic primer
aaggacttctttttgtttctaactataaacttggatcacc

SEQ ID NO: 32106 - DNA, 40 bp, Artificial Sequence
  Description of Artificial Sequence: Synthetic primer
gtaaattgtgcaggaatggcagtgtcaggaaaatttgaag

SEQ ID NO: 32107 - DNA, 40 bp, Artificial Sequence
  Description of Artificial Sequence: Synthetic primer
aggatccaccagtgaggacaacttcaagaagcattaaaaa

SEQ ID NO: 32108 - DNA, 40 bp, Artificial Sequence
  Description of Artificial Sequence: Synthetic primer
tcctaggaatggagacaataaaactctgtatttgcatgtg

SEQ ID NO: 32109 - DNA, 40 bp, Artificial Sequence
  Description of Artificial Sequence: Synthetic primer
aggagctgcccagagttgctgggagctgaaaaatcacatc

SEQ ID NO: 32110 - DNA, 40 bp, Artificial Sequence
  Description of Artificial Sequence: Synthetic primer
aggcagcgtttgcaggcgtgtttaccggcaggcagcgttt

SEQ ID NO: 32111 - DNA, 40 bp, Artificial Sequence
  Description of Artificial Sequence: Synthetic primer
gaggccagggcaatgttatgcaatccagtcatccagaagc

SEQ ID NO: 32112 - DNA, 40 bp, Artificial Sequence
  Description of Artificial Sequence: Synthetic primer
tggaaggcaagggtcacaaggctggagtacatggcagagc

SEQ ID NO: 32113 - DNA, 40 bp, Artificial Sequence
  Description of Artificial Sequence: Synthetic primer
ccactcggctccgcatctgctcacaaagcgctcggggcgc

SEQ ID NO: 32114 - DNA, 40 bp, Artificial Sequence
  Description of Artificial Sequence: Synthetic primer
ccatctttgccaggagagccatcagcacctttgggaccag

SEQ ID NO: 32115 - DNA, 40 bp, Artificial Sequence
  Description of Artificial Sequence: Synthetic primer
atgcaactacttattaaaattgttcactttttgtcttttg

SEQ ID NO: 32116 - DNA, 40 bp, Artificial Sequence
  Description of Artificial Sequence: Synthetic primer
gacctctatgacatcaagagggctgtggtccacactcacc

SEQ ID NO: 32117 - DNA, 40 bp, Artificial Sequence
  Description of Artificial Sequence: Synthetic primer
atcaaagcagatgatccttcctcctacatggaagttgttc

SEQ ID NO: 32118 - DNA, 40 bp, Artificial Sequence
  Description of Artificial Sequence: Synthetic primer
atctcacccgccacacccggacaggcggctggaggaggtc

SEQ ID NO: 32119 - DNA, 40 bp, Artificial Sequence
  Description of Artificial Sequence: Synthetic primer
caggtcctattcctgtgcaagaatagggcagattatcaag

SEQ ID NO: 32120 - DNA, 40 bp, Artificial Sequence
  Description of Artificial Sequence: Synthetic primer
caggctggatgaccacgcggaacttgctttcccggttcac

SEQ ID NO: 32121 - DNA, 40 bp, Artificial Sequence
  Description of Artificial Sequence: Synthetic primer
gaaccttcacccgtgacccttggccaacctgccacttcag

SEQ ID NO: 32122 - DNA, 40 bp, Artificial Sequence
  Description of Artificial Sequence: Synthetic primer
catcagaccagggccaaccaatcagaaggcaacttactgt

SEQ ID NO: 32123 - DNA, 40 bp, Artificial Sequence
  Description of Artificial Sequence: Synthetic primer
cggcggcctctctgtcatagtagccaccgttctgccactc

SEQ ID NO: 32124 - DNA, 40 bp, Artificial Sequence
  Description of Artificial Sequence: Synthetic primer
gtatggaacaacagatgacgaggaggcggctctcccaagc

SEQ ID NO: 32125 - DNA, 40 bp, Artificial Sequence
  Description of Artificial Sequence: Synthetic primer
gcagttaacaagatggaactctacacagcaaggataaatg

SEQ ID NO: 32126 - DNA, 40 bp, Artificial Sequence
  Description of Artificial Sequence: Synthetic primer
ttattcgtgcttcaaatcacagtcatattaaaagctggtc

SEQ ID NO: 32127 - DNA, 40 bp, Artificial Sequence
  Description of Artificial Sequence: Synthetic primer
gaatgtgctgatgccactggttctggaagggactgtggag

SEQ ID NO: 32128 - DNA, 40 bp, Artificial Sequence
  Description of Artificial Sequence: Synthetic primer
ctcagacttccaatgtttaagcaagaagaaggaaaaactg

SEQ ID NO: 32129 - DNA, 40 bp, Artificial Sequence
  Description of Artificial Sequence: Synthetic primer
gatttctgctcaggaaagtaggagaaagaagaaagaatac

SEQ ID NO: 32130 - DNA, 40 bp, Artificial Sequence
  Description of Artificial Sequence: Synthetic primer
tgtgtccagtttggttttgtctttttttatttggcaagtg

SEQ ID NO: 32131 - DNA, 40 bp, Artificial Sequence
  Description of Artificial Sequence: Synthetic primer
atttactaaagcttggggtccaccactagccagtatgatg

SEQ ID NO: 32132 - DNA, 40 bp, Artificial Sequence
  Description of Artificial Sequence: Synthetic primer
tttatactagggaggaactggcccagagggcgaagctcac

SEQ ID NO: 32133 - DNA, 40 bp, Artificial Sequence
  Description of Artificial Sequence: Synthetic primer
aatatttgtagcagaaaaatatagcctctctaagaagcag

SEQ ID NO: 32134 - DNA, 40 bp, Artificial Sequence
  Description of Artificial Sequence: Synthetic primer
aggaattagagtataaaagtaaacttaaagcacttaatga

SEQ ID NO: 32135 - DNA, 40 bp, Artificial Sequence
  Description of Artificial Sequence: Synthetic primer
tgaggagagaactcagcgacactacctgggccatacagac

SEQ ID NO: 32136 - DNA, 40 bp, Artificial Sequence
  Description of Artificial Sequence: Synthetic primer
gattccacttctgatctagtgccttcaaagcgatttcttg

SEQ ID NO: 32137 - DNA, 40 bp, Artificial Sequence
  Description of Artificial Sequence: Synthetic primer
gatggtcaagagcgtgccctacttcaaggataagggtgac

SEQ ID NO: 32138 - DNA, 40 bp, Artificial Sequence
  Description of Artificial Sequence: Synthetic primer
agggatttgtgcaatcggtggtacttcagagcagtctagc

SEQ ID NO: 32139 - DNA, 40 bp, Artificial Sequence
  Description of Artificial Sequence: Synthetic primer
gggacaaagaattggatctggatcatttggaacagtctac

SEQ ID NO: 32140 - DNA, 40 bp, Artificial Sequence
  Description of Artificial Sequence: Synthetic primer
tgatctttccagctgagttatctgggtgttgtgtctttac

SEQ ID NO: 32141 - DNA, 40 bp, Artificial Sequence
  Description of Artificial Sequence: Synthetic primer
ttcctcaaagacaatgagtggttctttcttttgccttctc

SEQ ID NO: 32142 - DNA, 40 bp, Artificial Sequence
  Description of Artificial Sequence: Synthetic primer
aaaaccagatgtaaaatgattggttcgcaagctcgtattt

SEQ ID NO: 32143 - DNA, 40 bp, Artificial Sequence
  Description of Artificial Sequence: Synthetic primer
ggacttcagccacagcctgagctttgggggcagggaggac

SEQ ID NO: 32144 - DNA, 40 bp, Artificial Sequence
  Description of Artificial Sequence: Synthetic primer
tgaagctctcagggcttccaccaaagcccagcaaacttgg

SEQ ID NO: 32145 - DNA, 40 bp, Artificial Sequence
  Description of Artificial Sequence: Synthetic primer
ttcactttttacttcaggttgcacggtctcagtgttactc

SEQ ID NO: 32146 - DNA, 40 bp, Artificial Sequence
  Description of Artificial Sequence: Synthetic primer
tgtggccctgctgtttcactgctggcgtcggaggaagtca

SEQ ID NO: 32147 - DNA, 40 bp, Artificial Sequence
  Description of Artificial Sequence: Synthetic primer
cctgcaagttagctggcacgcagactggcacctgcctcat

SEQ ID NO: 32148 - DNA, 40 bp, Artificial Sequence
  Description of Artificial Sequence: Synthetic primer
ttcaacattgtgcaagttgtcagcaaggccttttaatgtg

SEQ ID NO: 32149 - DNA, 40 bp, Artificial Sequence
  Description of Artificial Sequence: Synthetic primer
ggcctgcaaccagagtgctgtgcagtgttcagacttctcc

SEQ ID NO: 32150 - DNA, 40 bp, Artificial Sequence
  Description of Artificial Sequence: Synthetic primer
gggggagaataaaaccaacaaccaaaggaaagcatttcaa

SEQ ID NO: 32151 - DNA, 40 bp, Artificial Sequence
  Description of Artificial Sequence: Synthetic primer
atacggggttaggcggaatggctggtaccgaggccctgga

SEQ ID NO: 32152 - DNA, 40 bp, Artificial Sequence
  Description of Artificial Sequence: Synthetic primer
ttgttgtaagaggtcaattctctactgatgagcttgttgc

SEQ ID NO: 32153 - DNA, 40 bp, Artificial Sequence
  Description of Artificial Sequence: Synthetic primer
tctaagaagcccggctggggcagcagtgagcttttcatgg

SEQ ID NO: 32154 - DNA, 40 bp, Artificial Sequence
  Description of Artificial Sequence: Synthetic primer
ggaacaataatccaccagcttctcatctttgtgtcaaaac

SEQ ID NO: 32155 - DNA, 40 bp, Artificial Sequence
  Description of Artificial Sequence: Synthetic primer
tcccgccattcaggcaggtctcaccgggctgggagcatcg

SEQ ID NO: 32156 - DNA, 40 bp, Artificial Sequence
  Description of Artificial Sequence: Synthetic primer
tctggccctgttgaccatacccgctggggccttgttgtcc

SEQ ID NO: 32157 - DNA, 40 bp, Artificial Sequence
  Description of Artificial Sequence: Synthetic primer
gaaacaacaactgctacatctgttggaggagccaactagc

SEQ ID NO: 32158 - DNA, 40 bp, Artificial Sequence
  Description of Artificial Sequence: Synthetic primer
agccgtatcttctttcccttcccccagctccccaaaccag

SEQ ID NO: 32159 - DNA, 40 bp, Artificial Sequence
  Description of Artificial Sequence: Synthetic primer
agggcccatcatgacgttctggcccagaacccggctgttg

SEQ ID NO: 32160 - DNA, 40 bp, Artificial Sequence
  Description of Artificial Sequence: Synthetic primer
aaaaaaagtttgcacccccaaacgtcctgtatcttatgaa

SEQ ID NO: 32161 - DNA, 40 bp, Artificial Sequence
  Description of Artificial Sequence: Synthetic primer
gccatttttagtttaaaatcttgcatggcattaattgttc

SEQ ID NO: 32162 - DNA, 40 bp, Artificial Sequence
  Description of Artificial Sequence: Synthetic primer
gaaggcagccactgtctacatcagctgggtgactcagccc

SEQ ID NO: 32163 - DNA, 40 bp, Artificial Sequence
  Description of Artificial Sequence: Synthetic primer
gagggacattcttcaacgttgattcagtcaaagtgtttac

SEQ ID NO: 32164 - DNA, 40 bp, Artificial Sequence
  Description of Artificial Sequence: Synthetic primer
ctgctcgctgaggccacccacaaggcctccgccctctgtc

SEQ ID NO: 32165 - DNA, 40 bp, Artificial Sequence
  Description of Artificial Sequence: Synthetic primer
tagctcagtgacactaaaaacacctgatgtgacaaaactg

SEQ ID NO: 32166 - DNA, 40 bp, Artificial Sequence
  Description of Artificial Sequence: Synthetic primer
aaggggccactgtggaaagtgctggtggggtttgcccttg

SEQ ID NO: 32167 - DNA, 40 bp, Artificial Sequence
  Description of Artificial Sequence: Synthetic primer
cctggagcaggcttccatgctgctgtgggcgtccttgctg

SEQ ID NO: 32168 - DNA, 40 bp, Artificial Sequence
  Description of Artificial Sequence: Synthetic primer
catcatgcccgtggttgccttccgattcctcaggctcaac

SEQ ID NO: 32169 - DNA, 40 bp, Artificial Sequence
  Description of Artificial Sequence: Synthetic primer
aagtcctccacagtcagcatgtcctgtaatgtctgcatgg

SEQ ID NO: 32170 - DNA, 40 bp, Artificial Sequence
  Description of Artificial Sequence: Synthetic primer
cacaagttgaagaattacaaaaatctttacaggatcaagg

SEQ ID NO: 32171 - DNA, 40 bp, Artificial Sequence
  Description of Artificial Sequence: Synthetic primer
ttctcatgaagtagttttcttccctttttctttggtctgc

SEQ ID NO: 32172 - DNA, 40 bp, Artificial Sequence
  Description of Artificial Sequence: Synthetic primer
tatcctcaggctcctctgtgtaccagcttaactccaaacc

SEQ ID NO: 32173 - DNA, 40 bp, Artificial Sequence
  Description of Artificial Sequence: Synthetic primer
caacagaggcttgaattctaagtagaactgtattgctctg

SEQ ID NO: 32174 - DNA, 40 bp, Artificial Sequence
  Description of Artificial Sequence: Synthetic primer
gtctacttagatgataaccaaaaaccacctgtgggtgaag

SEQ ID NO: 32175 - DNA, 40 bp, Artificial Sequence
  Description of Artificial Sequence: Synthetic primer
gcatgatccgccacgggaaggagctgggcggcgagtccaa

SEQ ID NO: 32176 - DNA, 40 bp, Artificial Sequence
  Description of Artificial Sequence: Synthetic primer
gtggtgcatctccaccgccgtgtgcagctgcacactggcc

SEQ ID NO: 32177 - DNA, 40 bp, Artificial Sequence
  Description of Artificial Sequence: Synthetic primer
tttggagtatccttttcttttcttgtttgtagatctgtag

SEQ ID NO: 32178 - DNA, 40 bp, Artificial Sequence
  Description of Artificial Sequence: Synthetic primer
tcctcttgaaatttacctatgttcttcttgtaccggattc

SEQ ID NO: 32179 - DNA, 40 bp, Artificial Sequence
  Description of Artificial Sequence: Synthetic primer
aagctgttggcagtggcagccacggcgcctcctgatgcgc

SEQ ID NO: 32180 - DNA, 40 bp, Artificial Sequence
  Description of Artificial Sequence: Synthetic primer
cgggagcagcggcggcggggggcagccgctcgcccggacc

SEQ ID NO: 32181 - DNA, 40 bp, Artificial Sequence
  Description of Artificial Sequence: Synthetic primer
tctggcctgtgttgcttatgaacgtggccaatgtgatctg

SEQ ID NO: 32182 - DNA, 40 bp, Artificial Sequence
  Description of Artificial Sequence: Synthetic primer
atctgttaaatgttccgaagccactgccaaaacaactgtg

SEQ ID NO: 32183 - DNA, 40 bp, Artificial Sequence
  Description of Artificial Sequence: Synthetic primer
aagcaggcagcattagaggaagaacaggcacgtttgaaag

SEQ ID NO: 32184 - DNA, 40 bp, Artificial Sequence
  Description of Artificial Sequence: Synthetic primer
ggaaagaagcctccagctgctcctaccagcagatcaactg

SEQ ID NO: 32185 - DNA, 40 bp, Artificial Sequence
  Description of Artificial Sequence: Synthetic primer
cactttggaagctcataacctcatcagaaactgcctttag

SEQ ID NO: 32186 - DNA, 40 bp, Artificial Sequence
  Description of Artificial Sequence: Synthetic primer
tcctccagaggcacagaatgattttccagtggctatgcag

SEQ ID NO: 32187 - DNA, 40 bp, Artificial Sequence
  Description of Artificial Sequence: Synthetic primer
gtgtataaatcctcaaaatcttttttagtaccaaaattag

SEQ ID NO: 32188 - DNA, 40 bp, Artificial Sequence
  Description of Artificial Sequence: Synthetic primer
acgtggtattgctgtgggccaaccgtctatgacgcatctc

SEQ ID NO: 32189 - DNA, 40 bp, Artificial Sequence
  Description of Artificial Sequence: Synthetic primer
aaagccacagatcaggaaaagagcagaaaactacatgaac

SEQ ID NO: 32190 - DNA, 40 bp, Artificial Sequence
  Description of Artificial Sequence: Synthetic primer
cccaatccttctgtaggaatctgcgtgcactgctcgctgc

SEQ ID NO: 32191 - DNA, 40 bp, Artificial Sequence
  Description of Artificial Sequence: Synthetic primer
cataattcctctgatggtttttttaacaatggtcccctac

SEQ ID NO: 32192 - DNA, 40 bp, Artificial Sequence
  Description of Artificial Sequence: Synthetic primer
agggcgggtaggcggtttgtatccgggctgtgaggtgctc

SEQ ID NO: 32193 - DNA, 40 bp, Artificial Sequence
  Description of Artificial Sequence: Synthetic primer
cagcatgttctgctcctttgataccaagcgccacttgtgc

SEQ ID NO: 32194 - DNA, 40 bp, Artificial Sequence
  Description of Artificial Sequence: Synthetic primer
cctttcaaaatggagggaaccggtgacaggcgccagcaag

SEQ ID NO: 32195 - DNA, 40 bp, Artificial Sequence
  Description of Artificial Sequence: Synthetic primer
gtggctgccctgaagcgggagaaggatcgtctggtacagc

SEQ ID NO: 32196 - DNA, 40 bp, Artificial Sequence
  Description of Artificial Sequence: Synthetic primer
gcaaaagctcactgcatttgtctgttttttctttcagatg

SEQ ID NO: 32197 - DNA, 40 bp, Artificial Sequence
  Description of Artificial Sequence: Synthetic primer
acaaaatgacccccaaagctagctagaaacattgagaagg

SEQ ID NO: 32198 - DNA, 40 bp, Artificial Sequence
  Description of Artificial Sequence: Synthetic primer
ccacttcacaatcatttgaaaggccacacgaatctatcac

SEQ ID NO: 32199 - DNA, 40 bp, Artificial Sequence
  Description of Artificial Sequence: Synthetic primer
tggcccaccaaaacctgtatttgcttcttttcctttcttc

SEQ ID NO: 32200 - DNA, 40 bp, Artificial Sequence
  Description of Artificial Sequence: Synthetic primer
ttaaaatgtttctcccctcagttggcagaatctatttatg

SEQ ID NO: 32201 - DNA, 40 bp, Artificial Sequence
  Description of Artificial Sequence: Synthetic primer
cagatttcacaagatcacccagttcttcagaacattccag

SEQ ID NO: 32202 - DNA, 40 bp, Artificial Sequence
  Description of Artificial Sequence: Synthetic primer
caacagcctgctgaactggtcgcagttgatggtgtctgtg

SEQ ID NO: 32203 - DNA, 40 bp, Artificial Sequence
  Description of Artificial Sequence: Synthetic primer
aaaggaagggaaaactgatggccaacctagagcagcaagg

SEQ ID NO: 32204 - DNA, 40 bp, Artificial Sequence
  Description of Artificial Sequence: Synthetic primer
aaatgcttcaaaaaaattttcaattaaactcaaatattaa

SEQ ID NO: 32205 - DNA, 40 bp, Artificial Sequence
  Description of Artificial Sequence: Synthetic primer
gccgaggtgcgaggcgccgtggtaacctcccaagcaatag

SEQ ID NO: 32206 - DNA, 40 bp, Artificial Sequence
  Description of Artificial Sequence: Synthetic primer
tagtgcacactgggtagaccctccccaagttgccatcgtt

SEQ ID NO: 32207 - DNA, 40 bp, Artificial Sequence
  Description of Artificial Sequence: Synthetic primer
gtccggtgtccagctttggacagggtttatgacgtttctg

SEQ ID NO: 32208 - DNA, 40 bp, Artificial Sequence
  Description of Artificial Sequence: Synthetic primer
gtgcaagtattttcagcgagggtactgtatttatggagac

SEQ ID NO: 32209 - DNA, 40 bp, Artificial Sequence
  Description of Artificial Sequence: Synthetic primer
tccgcagactctgcggggtgaacaggagtgatgataaaat

SEQ ID NO: 32210 - DNA, 40 bp, Artificial Sequence
  Description of Artificial Sequence: Synthetic primer
accgcaacgtgcagtgccgccccacccaggtgcagctgcg

SEQ ID NO: 32211 - DNA, 40 bp, Artificial Sequence
  Description of Artificial Sequence: Synthetic primer
ccttgtagttgtggataccgaacttgtggggcatgttgac

SEQ ID NO: 32212 - DNA, 40 bp, Artificial Sequence
  Description of Artificial Sequence: Synthetic primer
gaactgcgctgcctacctgaagctgcggaactggcagtgg

SEQ ID NO: 32213 - DNA, 40 bp, Artificial Sequence
  Description of Artificial Sequence: Synthetic primer
cgtctggtccacgacgcacgactgtggccgcgggcacacc

SEQ ID NO: 32214 - DNA, 40 bp, Artificial Sequence
  Description of Artificial Sequence: Synthetic primer
aaagccaactgcacttgcattgtcttcacaactagtacat

SEQ ID NO: 32215 - DNA, 40 bp, Artificial Sequence
  Description of Artificial Sequence: Synthetic primer
cctctcctgccccccgcagtcggagctggggtctgtcccc

SEQ ID NO: 32216 - DNA, 40 bp, Artificial Sequence
  Description of Artificial Sequence: Synthetic primer
cacgcaacccaatttccggagaaccgagattgcgacgaac

SEQ ID NO: 32217 - DNA, 40 bp, Artificial Sequence
  Description of Artificial Sequence: Synthetic primer
atgggtcaaatattgaccaatgaactcgataaacatcaac

SEQ ID NO: 32218 - DNA, 40 bp, Artificial Sequence
  Description of Artificial Sequence: Synthetic primer
cagcccctggaacggtgttttctgaggcatgcccaggttc

SEQ ID NO: 32219 - DNA, 40 bp, Artificial Sequence
  Description of Artificial Sequence: Synthetic primer
aaccaggccaccaagaggcccagccctccaaaccctggat

SEQ ID NO: 32220 - DNA, 40 bp, Artificial Sequence
  Description of Artificial Sequence: Synthetic primer
gcctcccagccccgccttctcttccagatcttcgggactg

SEQ ID NO: 32221 - DNA, 40 bp, Artificial Sequence
  Description of Artificial Sequence: Synthetic primer
aatttttgaaatgggctgggaaaagccatctcctattcag

SEQ ID NO: 32222 - DNA, 40 bp, Artificial Sequence
  Description of Artificial Sequence: Synthetic primer
cagtaaaagtgccaacaggtccacactgagccctgaggta

SEQ ID NO: 32223 - DNA, 40 bp, Artificial Sequence
  Description of Artificial Sequence: Synthetic primer
tggggcggcagtactgggaggagctggagttgaaggtgtg

SEQ ID NO: 32224 - DNA, 40 bp, Artificial Sequence
  Description of Artificial Sequence: Synthetic primer
ctctaaataaatcaagatgtacaatctgtggtaaactaac

SEQ ID NO: 32225 - DNA, 40 bp, Artificial Sequence
  Description of Artificial Sequence: Synthetic primer
gtgataaggttgtgtgtcgtgtgggagtggggcgattttt

SEQ ID NO: 32226 - DNA, 40 bp, Artificial Sequence
  Description of Artificial Sequence: Synthetic primer
aatgaaggattctgtagacagggctgcacgtatcggcttt

SEQ ID NO: 32227 - DNA, 40 bp, Artificial Sequence
  Description of Artificial Sequence: Synthetic primer
ccagggcgtgcccagagctgagccgggcaccgaggcccgg

SEQ ID NO: 32228 - DNA, 40 bp, Artificial Sequence
  Description of Artificial Sequence: Synthetic primer
catttttctgatctcctactggtacaggaaacagaaaagc

SEQ ID NO: 32229 - DNA, 40 bp, Artificial Sequence
  Description of Artificial Sequence: Synthetic primer
tctttgttttctaccacaaagccattattttcatcaggac

SEQ ID NO: 32230 - DNA, 40 bp, Artificial Sequence
  Description of Artificial Sequence: Synthetic primer
gaatgatcaataagtgtattagttaactgctgcagtttgg

SEQ ID NO: 32231 - DNA, 40 bp, Artificial Sequence
  Description of Artificial Sequence: Synthetic primer
cgttctggcaggcatttggcatcagctggcactcgtccac

SEQ ID NO: 32232 - DNA, 40 bp, Artificial Sequence
  Description of Artificial Sequence: Synthetic primer
accgacctcatgttcaaggtgagctcgccccactgcgact

SEQ ID NO: 32233 - DNA, 40 bp, Artificial Sequence; identical to SEQ ID NO: 22717
  Description of Artificial Sequence: Synthetic primer

SEQ ID NO: 32234 - DNA, 40 bp, Artificial Sequence
  Description of Artificial Sequence: Synthetic primer
gttacacagttgtgccatttgtgcttctttctataaaacc

SEQ ID NO: 32235 - DNA, 40 bp, Artificial Sequence
  Description of Artificial Sequence: Synthetic primer
tccagtttctgtggggcttgagaggaggttggggtagtgg

SEQ ID NO: 32236 - DNA, 40 bp, Artificial Sequence
  Description of Artificial Sequence: Synthetic primer
agttatctgtttgaatgtcctgtctttcttcatgcaactg

SEQ ID NO: 32237 - DNA, 40 bp, Artificial Sequence
  Description of Artificial Sequence: Synthetic primer
ctctgctggttgagctcatcacgtcagggctgcccacgtc

SEQ ID NO: 32238 - DNA, 40 bp, Artificial Sequence
  Description of Artificial Sequence: Synthetic primer
tcatcatactttgaaagattaagcaaatttcaagatggag

SEQ ID NO: 32239 - DNA, 40 bp, Artificial Sequence
  Description of Artificial Sequence: Synthetic primer
aaagatgatatcaagagggtcatggcggcgatcgagaaag

SEQ ID NO: 32240 - DNA, 40 bp, Artificial Sequence
  Description of Artificial Sequence: Synthetic primer
tttgtatatttatccacttagttaaagtagaagtactatg

SEQ ID NO: 32241 - DNA, 40 bp, Artificial Sequence
  Description of Artificial Sequence: Synthetic primer
aatccagattttttaaactgttttaaatgtgaattcttcc

SEQ ID NO: 32242 - DNA, 40 bp, Artificial Sequence
  Description of Artificial Sequence: Synthetic primer
tttttgttgattgttctttcatcaattgtgtctggcactg

SEQ ID NO: 32243 - DNA, 40 bp, Artificial Sequence
  Description of Artificial Sequence: Synthetic primer
taaaaatagaaactttgtttttcaaggacaggcacctgtc

SEQ ID NO: 32244 - DNA, 40 bp, Artificial Sequence
  Description of Artificial Sequence: Synthetic primer
ccgtacaaagtgtacaggattgttcctgagggagccaaaa

SEQ ID NO: 32245 - DNA, 40 bp, Artificial Sequence
  Description of Artificial Sequence: Synthetic primer
tctcctcagaaatcactaaatactactctgaggggcttag

SEQ ID NO: 32246 - DNA, 40 bp, Artificial Sequence
  Description of Artificial Sequence: Synthetic primer
tccctgcccttggctgccctgggtccaggaggagagagac

SEQ ID NO: 32247 - DNA, 40 bp, Artificial Sequence
  Description of Artificial Sequence: Synthetic primer
cctggtgcccagccctgccccttcctccctgcccttcctg

SEQ ID NO: 32248 - DNA, 40 bp, Artificial Sequence
  Description of Artificial Sequence: Synthetic primer
gagtgccactcaatgaaggagaaggctcttgcttttgaac

SEQ ID NO: 32249 - DNA, 40 bp, Artificial Sequence
  Description of Artificial Sequence: Synthetic primer
caggactcagagctccttctgtccccatggggaggtcatc

SEQ ID NO: 32250 - DNA, 40 bp, Artificial Sequence
  Description of Artificial Sequence: Synthetic primer
tgtgggtgtgaaagggccagcgagtgtgcggctgtgactg

SEQ ID NO: 32251 - DNA, 40 bp, Artificial Sequence
  Description of Artificial Sequence: Synthetic primer
agaaatgaagcaaatggaagtgtatcggagccattctaaa

SEQ ID NO: 32252 - DNA, 40 bp, Artificial Sequence
  Description of Artificial Sequence: Synthetic primer
ccagaatgagtggggggacgaggacctggagaccaagaag

SEQ ID NO: 32253 - DNA, 40 bp, Artificial Sequence
  Description of Artificial Sequence: Synthetic primer
cgcagcagtggtggctatgaacccagaggtcgtggaggtg

SEQ ID NO: 32254 - DNA, 40 bp, Artificial Sequence
  Description of Artificial Sequence: Synthetic primer
agggaagtttttgcagcctttcgcctagcgtggccttcag

SEQ ID NO: 32255 - DNA, 40 bp, Artificial Sequence
  Description of Artificial Sequence: Synthetic primer
cataaggtgctgtgccagaaatgaactgggcagggaatgc

SEQ ID NO: 32256 - DNA, 40 bp, Artificial Sequence
  Description of Artificial Sequence: Synthetic primer
tgcagttaaaggtatggctatttcgtcgtgttgcctcttg

SEQ ID NO: 32257 - DNA, 40 bp, Artificial Sequence
  Description of Artificial Sequence: Synthetic primer
agtatgcaaaagttctgacttgactttagtctgcaaaatg

SEQ ID NO: 32258 - DNA, 40 bp, Artificial Sequence
  Description of Artificial Sequence: Synthetic primer
cttcatactacagcatgagtccaggagcaatgaggaggtc

SEQ ID NO: 32259 - DNA, 40 bp, Artificial Sequence
  Description of Artificial Sequence: Synthetic primer
ccctagaaggggctgatgggggaggggaccccaggcctgg

SEQ ID NO: 32260 - DNA, 40 bp, Artificial Sequence
  Description of Artificial Sequence: Synthetic primer
caaagaaactcgtcgcatcttccttgagtttcatcagttc

SEQ ID NO: 32261 - DNA, 40 bp, Artificial Sequence
  Description of Artificial Sequence: Synthetic primer
gtctctatctagcaaaagatcaatccgttaaaagaaaaag

SEQ ID NO: 32262 - DNA, 40 bp, Artificial Sequence
  Description of Artificial Sequence: Synthetic primer
gctgagcgatatcacagaacacaagattaatcaatgtcaa

SEQ ID NO: 32263 - DNA, 40 bp, Artificial Sequence
  Description of Artificial Sequence: Synthetic primer
tctgctttttatcgggatccgtggtctcatttaattttac

SEQ ID NO: 32264 - DNA, 40 bp, Artificial Sequence
  Description of Artificial Sequence: Synthetic primer
ggaggatagcgagaagatgctctgggggttttgtttttgc

SEQ ID NO: 32265 - DNA, 40 bp, Artificial Sequence
  Description of Artificial Sequence: Synthetic primer
aacgcgcgcgagacacccgcagggcgggggcgcgaggtag

SEQ ID NO: 32266 - DNA, 40 bp, Artificial Sequence
  Description of Artificial Sequence: Synthetic primer
gttatagtggttatagtggtgtccctaaagggaggaaatg

SEQ ID NO: 32267 - DNA, 40 bp, Artificial Sequence
  Description of Artificial Sequence: Synthetic primer
taggtgcttaatttctcattttatcccacttatgagattg

SEQ ID NO: 32268 - DNA, 40 bp, Artificial Sequence
  Description of Artificial Sequence: Synthetic primer
aggtctgcatggctgatgctgtttgccagcttctggattc

SEQ ID NO: 32269 - DNA, 40 bp, Artificial Sequence
  Description of Artificial Sequence: Synthetic primer
agacatcagcaacggggcactggctttcacccccttggac

SEQ ID NO: 32270 - DNA, 40 bp, Artificial Sequence
  Description of Artificial Sequence: Synthetic primer
gatgtatttagatcaaatttcaaaataattaaaattcaag

SEQ ID NO: 32271 - DNA, 40 bp, Artificial Sequence
  Description of Artificial Sequence: Synthetic primer
gggcaggccctgcacacgcctgcagccagccggctcggtg

SEQ ID NO: 32272 - DNA, 40 bp, Artificial Sequence
  Description of Artificial Sequence: Synthetic primer
tcaccatggcctccccagccatgctgggaaatgtagagtc

SEQ ID NO: 32273 - DNA, 40 bp, Artificial Sequence
  Description of Artificial Sequence: Synthetic primer
cccaacccaagcttcatgagacaactggaagagtatcagg

SEQ ID NO: 32274 - DNA, 40 bp, Artificial Sequence
  Description of Artificial Sequence: Synthetic primer
tttgatgggctggatgacgatgaaccatccctagccaatg

SEQ ID NO: 32275 - DNA, 40 bp, Artificial Sequence
  Description of Artificial Sequence: Synthetic primer
actcttgtttttcgctttttcatcgttcattgcaatttgg

SEQ ID NO: 32276 - DNA, 40 bp, Artificial Sequence
  Description of Artificial Sequence: Synthetic primer
gccagccccagcgaagccggctctgcggggccttctcgcc

SEQ ID NO: 32277 - DNA, 40 bp, Artificial Sequence
  Description of Artificial Sequence: Synthetic primer
aggtatggactccaggccctgactgtagaagttagaagtg

SEQ ID NO: 32278 - DNA, 40 bp, Artificial Sequence
  Description of Artificial Sequence: Synthetic primer
taaatttctttcaatgctttcaaagataaattccaatttc

SEQ ID NO: 32279 - DNA, 40 bp, Artificial Sequence
  Description of Artificial Sequence: Synthetic primer
aacgccaggcacgcttccagaacgcctgccgcgacggccg

SEQ ID NO: 32280 - DNA, 40 bp, Artificial Sequence
  Description of Artificial Sequence: Synthetic primer
gtggttttagacaagctgctccctaagttaaaagaacaag

SEQ ID NO: 32281 - DNA, 40 bp, Artificial Sequence
  Description of Artificial Sequence: Synthetic primer
tggaagatgatttaaaaatgattcaccctggaatacatgc

SEQ ID NO: 32282 - DNA, 40 bp, Artificial Sequence
  Description of Artificial Sequence: Synthetic primer
aagaccccttcaggcatcaagttgaccatcaacaaactcc

SEQ ID NO: 32283 - DNA, 40 bp, Artificial Sequence
  Description of Artificial Sequence: Synthetic primer
cactggattgcatctggccaaacgcttttgcaggcttctc

SEQ ID NO: 32284 - DNA, 40 bp, Artificial Sequence
  Description of Artificial Sequence: Synthetic primer
ttgcgtactccatcaccaggtacagcgtcttctcagtctc

SEQ ID NO: 32285 - DNA, 40 bp, Artificial Sequence
  Description of Artificial Sequence: Synthetic primer
acactgtcttcgtgttttgtaaaaaataggcaggaaggcc

SEQ ID NO: 32286 - DNA, 40 bp, Artificial Sequence
  Description of Artificial Sequence: Synthetic primer
ggtcatttttttcttgatgctggatttagaaggttctttc

SEQ ID NO: 32287 - DNA, 40 bp, Artificial Sequence
  Description of Artificial Sequence: Synthetic primer
actaccataagatggtgtgttccttccagcggctgttaaa

SEQ ID NO: 32288 - DNA, 40 bp, Artificial Sequence
  Description of Artificial Sequence: Synthetic primer
atctgcactgttactaaactcgggtagcgaaatgcaggag

SEQ ID NO: 32289 - DNA, 40 bp, Artificial Sequence
  Description of Artificial Sequence: Synthetic primer
tgttctccagtggcactttagatagaatggtagcaatatc

SEQ ID NO: 32290 - DNA, 40 bp, Artificial Sequence; identical to SEQ ID NO: 21296
  Description of Artificial Sequence: Synthetic primer

SEQ ID NO: 32291 - DNA, 40 bp, Artificial Sequence
  Description of Artificial Sequence: Synthetic primer
cactctctgccttctctgaccccaagaagaccaaaccatc

SEQ ID NO: 32292 - DNA, 40 bp, Artificial Sequence
  Description of Artificial Sequence: Synthetic primer
accggctacagcgtggaccccgtggccggctatcagtacg

SEQ ID NO: 32293 - DNA, 40 bp, Artificial Sequence
  Description of Artificial Sequence: Synthetic primer
atggagtgttgtgatccgccactcacccgtatgccaaaag

SEQ ID NO: 32294 - DNA, 40 bp, Artificial Sequence
  Description of Artificial Sequence: Synthetic primer
gtctgaatccagccactcaccgtggcggcggctctggttg

SEQ ID NO: 32295 - DNA, 40 bp, Artificial Sequence
  Description of Artificial Sequence: Synthetic primer
cctcgggggtttcctgctttatggcgaagggtgagtgagg

SEQ ID NO: 32296 - DNA, 40 bp, Artificial Sequence
  Description of Artificial Sequence: Synthetic primer
catttaaaaagttttctgaaaaaacttttgcaataaaaaa

SEQ ID NO: 32297 - DNA, 40 bp, Artificial Sequence
  Description of Artificial Sequence: Synthetic primer
tggagaataactcctcggttctagggctaaacggcaattc

SEQ ID NO: 32298 - DNA, 40 bp, Artificial Sequence
  Description of Artificial Sequence: Synthetic primer
atatgaaatccaaacctggtactcctcgccttacccacag

SEQ ID NO: 32299 - DNA, 40 bp, Artificial Sequence
  Description of Artificial Sequence: Synthetic primer
cataccctagaagtgaggctggatcctggtcctattgagc

SEQ ID NO: 32300 - DNA, 40 bp, Artificial Sequence
  Description of Artificial Sequence: Synthetic primer
ttgaatttaagttgttggtgacatctgcatcatttcatag

SEQ ID NO: 32301 - DNA, 40 bp, Artificial Sequence
  Description of Artificial Sequence: Synthetic primer
agtaaaattataactcctcagcctcattttaagacacaac

SEQ ID NO: 32302 - DNA, 40 bp, Artificial Sequence
  Description of Artificial Sequence: Synthetic primer
accagccggtgcacagctggcaggttaccctgcaccacag

SEQ ID NO: 32303 - DNA, 40 bp, Artificial Sequence
  Description of Artificial Sequence: Synthetic primer
aagcctcttcaaggagggaaaagaaagaatgtatgaggag

SEQ ID NO: 32304 - DNA, 40 bp, Artificial Sequence
  Description of Artificial Sequence: Synthetic primer
ggtctgccttgatggcagtcaggatcaacagattctgtag

SEQ ID NO: 32305 - DNA, 40 bp, Artificial Sequence
  Description of Artificial Sequence: Synthetic primer
ctcgaagtgatgaattacagaggcacagaagaacacatac

SEQ ID NO: 32306 - DNA, 40 bp, Artificial Sequence
  Description of Artificial Sequence: Synthetic primer
aaatgtttctgttccccttacaagtgactaccacgtcacc

SEQ ID NO: 32307 - DNA, 40 bp, Artificial Sequence
  Description of Artificial Sequence: Synthetic primer
aaaacctaataagagagagccctttcaactcaggcatacg

SEQ ID NO: 32308 - DNA, 40 bp, Artificial Sequence
  Description of Artificial Sequence: Synthetic primer
cggcctccctgtctcgcactggctgctccgcccgcctgtc

SEQ ID NO: 32309 - DNA, 40 bp, Artificial Sequence
  Description of Artificial Sequence: Synthetic primer
attctgtactgtgtacaataaagaagtttgcttttcgttt

SEQ ID NO: 32310 - DNA, 40 bp, Artificial Sequence
  Description of Artificial Sequence: Synthetic primer
ccccattggtcctcctggccctgctggtgcccctggtgac

SEQ ID NO: 32311 - DNA, 40 bp, Artificial Sequence
  Description of Artificial Sequence: Synthetic primer
ggaaccacaccacatctaagcctgaaggggcgtctgttcc

SEQ ID NO: 32312 - DNA, 40 bp, Artificial Sequence
  Description of Artificial Sequence: Synthetic primer
gcagtcgctcactggtctcactaggagactgccagtcacc

SEQ ID NO: 32313 - DNA, 40 bp, Artificial Sequence
  Description of Artificial Sequence: Synthetic primer
taagtgctgatttcaagttgctaaaacattacctgattgg

SEQ ID NO: 32314 - DNA, 40 bp, Artificial Sequence
  Description of Artificial Sequence: Synthetic primer
ctcataaacccgcttcttaaggtgcgccgccatgcctacc

SEQ ID NO: 32315 - DNA, 40 bp, Artificial Sequence
  Description of Artificial Sequence: Synthetic primer
agataaatgcatataacaataattttaaatcattttgtag

SEQ ID NO: 32316 - DNA, 40 bp, Artificial Sequence
  Description of Artificial Sequence: Synthetic primer
caacaggcaaccctgaggcagctggctccctctctctgcc

SEQ ID NO: 32317 - DNA, 40 bp, Artificial Sequence
  Description of Artificial Sequence: Synthetic primer
agccacccagtgggggtccttctacagcccagcccagacg

SEQ ID NO: 32318 - DNA, 40 bp, Artificial Sequence
  Description of Artificial Sequence: Synthetic primer
cctgtccaacgaagagtgaactgcaacgtaggtccctgag

SEQ ID NO: 32319 - DNA, 40 bp, Artificial Sequence
  Description of Artificial Sequence: Synthetic primer
ctgaaataatctgaaattgcttcatcatattgtgccgtat

SEQ ID NO: 32320 - DNA, 40 bp, Artificial Sequence
  Description of Artificial Sequence: Synthetic primer
agcagcaagatggacccaatcattgcagaacattctatgg

SEQ ID NO: 32321 - DNA, 40 bp, Artificial Sequence
  Description of Artificial Sequence: Synthetic primer
ggcgaaggtcagcgccgacggcagccggcacctgacggcg

SEQ ID NO: 32322 - DNA, 40 bp, Artificial Sequence
  Description of Artificial Sequence: Synthetic primer
cgaataaaaaaagatgagaagcagaacttactatccgttg

SEQ ID NO: 32323 - DNA, 40 bp, Artificial Sequence
  Description of Artificial Sequence: Synthetic primer
aaaacaaagtcactattcccttttttgaaacaggaaaaaa

SEQ ID NO: 32324 - DNA, 40 bp, Artificial Sequence
  Description of Artificial Sequence: Synthetic primer
gtggagaccagcacatgcgtggtgtttggggagccacact

SEQ ID NO: 32325 - DNA, 40 bp, Artificial Sequence; identical to SEQ ID NO: 27582
  Description of Artificial Sequence: Synthetic primer

SEQ ID NO: 32326 - DNA, 40 bp, Artificial Sequence
  Description of Artificial Sequence: Synthetic primer
caatggccttcttaagatcaaaatctgcgaggccgtgagc

SEQ ID NO: 32327 - DNA, 40 bp, Artificial Sequence
  Description of Artificial Sequence: Synthetic primer
tggcaaagtgagccctggtacaggatttaattgtgacctc

SEQ ID NO: 32328 - DNA, 40 bp, Artificial Sequence
  Description of Artificial Sequence: Synthetic primer
ggccaccaacttccctctgcggccgtttgtcattcccttc

SEQ ID NO: 32329 - DNA, 40 bp, Artificial Sequence
  Description of Artificial Sequence: Synthetic primer
tctccaggctgaagtatatggggcgagactagctgccaag

SEQ ID NO: 32330 - DNA, 40 bp, Artificial Sequence
  Description of Artificial Sequence: Synthetic primer
tctcactctgccctggtccaagtttgcagagcagtgttgc

SEQ ID NO: 32331 - DNA, 40 bp, Artificial Sequence
  Description of Artificial Sequence: Synthetic primer
tagacgcggggacttcagggcagggggcgccccctgcccg

SEQ ID NO: 32332 - DNA, 40 bp, Artificial Sequence
  Description of Artificial Sequence: Synthetic primer
ggacctccccagtagctataacgaagtcctccggctcatc

SEQ ID NO: 32333 - DNA, 40 bp, Artificial Sequence
  Description of Artificial Sequence: Synthetic primer
tgaaggtggaactgctggaacccgtctcaatggcactctc

SEQ ID NO: 32334 - DNA, 40 bp, Artificial Sequence
  Description of Artificial Sequence: Synthetic primer
tccagccacagccccggttcaggctcctccaccactcagg

SEQ ID NO: 32335 - DNA, 40 bp, Artificial Sequence
  Description of Artificial Sequence: Synthetic primer
agccagtacacacactgtttcattttgaggtaacgttcag

SEQ ID NO: 32336 - DNA, 40 bp, Artificial Sequence
  Description of Artificial Sequence: Synthetic primer
cagacgaagtggaaacagagagcaggggccctcccaccac

SEQ ID NO: 32337 - DNA, 40 bp, Artificial Sequence
  Description of Artificial Sequence: Synthetic primer
cagtggattgaaggcacagctagaaaacatgaagactgag

SEQ ID NO: 32338 - DNA, 40 bp, Artificial Sequence
  Description of Artificial Sequence: Synthetic primer
agcaatcagagtataatgtttatggtgacaaaattaaagg

SEQ ID NO: 32339 - DNA, 40 bp, Artificial Sequence
  Description of Artificial Sequence: Synthetic primer
acattttaacataaaaaataaattatgttgagccattttg

SEQ ID NO: 32340 - DNA, 40 bp, Artificial Sequence
  Description of Artificial Sequence: Synthetic primer
tttgccggtctctttacatctgcccacttcattttcattc

SEQ ID NO: 32341 - DNA, 40 bp, Artificial Sequence
  Description of Artificial Sequence: Synthetic primer
tcagccgacaactatttcggccttttgggggtgggtctgg

SEQ ID NO: 32342 - DNA, 40 bp, Artificial Sequence
  Description of Artificial Sequence: Synthetic primer
ctgcttgtgctgcctttctgctgaacctctctgcttcctg

SEQ ID NO: 32343 - DNA, 40 bp, Artificial Sequence
  Description of Artificial Sequence: Synthetic primer
aaacaattgtaaaagcagatggtaaatatgtgaagaaatg

SEQ ID NO: 32344 - DNA, 40 bp, Artificial Sequence
  Description of Artificial Sequence: Synthetic primer
tatttaactttttgccaaataaaatatattgattcttttc

SEQ ID NO: 32345 - DNA, 40 bp, Artificial Sequence
  Description of Artificial Sequence: Synthetic primer
caccaaagtcaccagagggaaaaacaagtgcacagacaac

SEQ ID NO: 32346 - DNA, 40 bp, Artificial Sequence
  Description of Artificial Sequence: Synthetic primer
caggacttctttgatacagcttatagcttccgttgtgttg

SEQ ID NO: 32347 - DNA, 40 bp, Artificial Sequence
  Description of Artificial Sequence: Synthetic primer
gttaatagttgttctgataaatcatgcaattaaagtaaag

SEQ ID NO: 32348 - DNA, 40 bp, Artificial Sequence
  Description of Artificial Sequence: Synthetic primer
gaaatcaaacatgatccggaagtcactggagatgttggag

SEQ ID NO: 32349 - DNA, 40 bp, Artificial Sequence
  Description of Artificial Sequence: Synthetic primer
gcttgtcggccaggagctcgccgtactgcggcagtgcgcc

SEQ ID NO: 32350 - DNA, 40 bp, Artificial Sequence
  Description of Artificial Sequence: Synthetic primer
atgagttttatagcagtactatcatgagagtaactggctg

SEQ ID NO: 32351 - DNA, 40 bp, Artificial Sequence
  Description of Artificial Sequence: Synthetic primer
ctcgcccgtgctgcaggactgggtcacggccacagacatc

SEQ ID NO: 32352 - DNA, 40 bp, Artificial Sequence
  Description of Artificial Sequence: Synthetic primer
ctacaaggatctgcagccatttatattgcttaggctactg

SEQ ID NO: 32353 - DNA, 40 bp, Artificial Sequence
  Description of Artificial Sequence: Synthetic primer
gtcgcaattgctagctagatggcattaaatgtcactaacc

SEQ ID NO: 32354 - DNA, 40 bp, Artificial Sequence
  Description of Artificial Sequence: Synthetic primer
agaatttatttttgtttcattggttgtttcacagaattag

SEQ ID NO: 32355 - DNA, 40 bp, Artificial Sequence
  Description of Artificial Sequence: Synthetic primer
aacttctcgtccagcccttctacccccgtgggctcccccc

SEQ ID NO: 32356 - DNA, 40 bp, Artificial Sequence
  Description of Artificial Sequence: Synthetic primer
agttcagtaacactatcaagggttttagggtcagccacag

SEQ ID NO: 32357 - DNA, 40 bp, Artificial Sequence
  Description of Artificial Sequence: Synthetic primer
cagacatgacagtgagaatgcagaaagaattctttttaac

SEQ ID NO: 32358 - DNA, 40 bp, Artificial Sequence
  Description of Artificial Sequence: Synthetic primer
tcagcaccgctgggggagggcctgacgtcggcaccgctgg

SEQ ID NO: 32359 - DNA, 40 bp, Artificial Sequence
  Description of Artificial Sequence: Synthetic primer
gcacagtatcctcagggtctgggagccctccagctctatc

SEQ ID NO: 32360 - DNA, 40 bp, Artificial Sequence
  Description of Artificial Sequence: Synthetic primer
gagtaagagtcttaaacaaaccgaccagcccaaagcacag

SEQ ID NO: 32361 - DNA, 40 bp, Artificial Sequence
  Description of Artificial Sequence: Synthetic primer
cgcttgggggacagccctttaagacgacatctccgcgaac

SEQ ID NO: 32362 - DNA, 40 bp, Artificial Sequence
  Description of Artificial Sequence: Synthetic primer
gtcttcttctatctcttcaccaatacttatctcacttttc

SEQ ID NO: 32363 - DNA, 40 bp, Artificial Sequence
  Description of Artificial Sequence: Synthetic primer
cacttccctctgtttctctttccttggctcccattcactc

SEQ ID NO: 32364 - DNA, 40 bp, Artificial Sequence
  Description of Artificial Sequence: Synthetic primer
cctctgggagggcgcggcatgccagcactcccgcatgatc

SEQ ID NO: 32365 - DNA, 40 bp, Artificial Sequence
  Description of Artificial Sequence: Synthetic primer
acgagttcaagcaggcctgccagctctgctaccccaagac

SEQ ID NO: 32366 - DNA, 40 bp, Artificial Sequence
  Description of Artificial Sequence: Synthetic primer
taaggtgggctattctttagcgccagctttgggttctgac

SEQ ID NO: 32367 - DNA, 40 bp, Artificial Sequence
  Description of Artificial Sequence: Synthetic primer
tctcttctaactgctgctgccgcctccgctcctcgtcctg

SEQ ID NO: 32368 - DNA, 40 bp, Artificial Sequence
  Description of Artificial Sequence: Synthetic primer
gagtgcaagcgaatgtatgcaggacttcaacaccatgttt

SEQ ID NO: 32369 - DNA, 40 bp, Artificial Sequence
  Description of Artificial Sequence: Synthetic primer
atctcggcaaagcttgcgttcctgagccaataagccactg

SEQ ID NO: 32370 - DNA, 40 bp, Artificial Sequence
  Description of Artificial Sequence: Synthetic primer
ttcattggtgctagtatccttacaatactagagctctttg

SEQ ID NO: 32371 - DNA, 40 bp, Artificial Sequence
  Description of Artificial Sequence: Synthetic primer
gtgaaagtccatgataaagagacccctcaagacagtttgg

SEQ ID NO: 32372 - DNA, 40 bp, Artificial Sequence
  Description of Artificial Sequence: Synthetic primer
ccctaacagccgcagaaccccggggcccgacctggaagag

SEQ ID NO: 32373 - DNA, 40 bp, Artificial Sequence
  Description of Artificial Sequence: Synthetic primer
ttaagcctcagaaaatgagggagcacctggagctgttctg

SEQ ID NO: 32374 - DNA, 40 bp, Artificial Sequence
  Description of Artificial Sequence: Synthetic primer
agaagactgcagcttcaaacgtcactcccagcctcacagg

SEQ ID NO: 32375 - DNA, 40 bp, Artificial Sequence
  Description of Artificial Sequence: Synthetic primer
gtcagccaggccacaaacaggtgtaaaattatgaaaggag

SEQ ID NO: 32376 - DNA, 40 bp, Artificial Sequence
  Description of Artificial Sequence: Synthetic primer
ctctgtcgaaggcaccccggaggaatgcctccagcatttc

SEQ ID NO: 32377 - DNA, 40 bp, Artificial Sequence
  Description of Artificial Sequence: Synthetic primer
tgtaatgtttcaccacctctccctggttctggtcgaagtc

SEQ ID NO: 32378 - DNA, 40 bp, Artificial Sequence
  Description of Artificial Sequence: Synthetic primer
ccacacaaacttgatgaaaccactcatcacagccaccatc

SEQ ID NO: 32379 - DNA, 40 bp, Artificial Sequence
  Description of Artificial Sequence: Synthetic primer
gaggccagcaagaagaagcggcgggagcccctcggcgagg

SEQ ID NO: 32380 - DNA, 40 bp, Artificial Sequence
  Description of Artificial Sequence: Synthetic primer
ggcatttgtgtttttgatatttgtgtctgttactactttt

SEQ ID NO: 32381 - DNA, 40 bp, Artificial Sequence
  Description of Artificial Sequence: Synthetic primer
tgcagccagaacagctctgctggatttccgggtggggggc

SEQ ID NO: 32382 - DNA, 40 bp, Artificial Sequence
  Description of Artificial Sequence: Synthetic primer
catcgaccgaggagcacaaagaagttctgtttctgttttt

SEQ ID NO: 32383 - DNA, 40 bp, Artificial Sequence
  Description of Artificial Sequence: Synthetic primer
tcttgtcattctgcgtggaaggccttcttggccagcgtgg

SEQ ID NO: 32384 - DNA, 40 bp, Artificial Sequence
  Description of Artificial Sequence: Synthetic primer
tggattgcactgggccactccagggttgggtgcaggcttc

SEQ ID NO: 32385 - DNA, 40 bp, Artificial Sequence
  Description of Artificial Sequence: Synthetic primer
cttcacggtttgccgaagttcctccagctcttttatctgg

SEQ ID NO: 32386 - DNA, 40 bp, Artificial Sequence
  Description of Artificial Sequence: Synthetic primer
actttctggagtaatgagtatatatcagttattgtacatg

SEQ ID NO: 32387 - DNA, 40 bp, Artificial Sequence
  Description of Artificial Sequence: Synthetic primer
tcccccaagattgacgaaaccacagtcagttgccataaag

SEQ ID NO: 32388 - DNA, 40 bp, Artificial Sequence
  Description of Artificial Sequence: Synthetic primer
tcgccccgacttacgcagtcttcagggttctttggaaatc

SEQ ID NO: 32389 - DNA, 40 bp, Artificial Sequence
  Description of Artificial Sequence: Synthetic primer
atgtatttgaagggaaatgtgtatggctcagatccttttg

SEQ ID NO: 32390 - DNA, 40 bp, Artificial Sequence
  Description of Artificial Sequence: Synthetic primer
cactgctcggtcaacgagtccctgggcgcggccgtggggc

SEQ ID NO: 32391 - DNA, 40 bp, Artificial Sequence
  Description of Artificial Sequence: Synthetic primer
ccctgtaaatagagtctgtagcaaaataagagctgcttcc

SEQ ID NO: 32392 - DNA, 40 bp, Artificial Sequence
  Description of Artificial Sequence: Synthetic primer
tttccaaaatttgctctcactgccaattcacctcaaatag

SEQ ID NO: 32393 - DNA, 40 bp, Artificial Sequence
  Description of Artificial Sequence: Synthetic primer
aggtaggcgctaaaggctttgggctaaagccagcacgcgg

SEQ ID NO: 32394 - DNA, 40 bp, Artificial Sequence
  Description of Artificial Sequence: Synthetic primer
tgcgacgtgcactacgagaactaccgcgcgcactgcatcc

SEQ ID NO: 32395 - DNA, 40 bp, Artificial Sequence
  Description of Artificial Sequence: Synthetic primer
aatgaaaccacaatctcttctctaatagggaaaatatttt

SEQ ID NO: 32396 - DNA, 40 bp, Artificial Sequence
  Description of Artificial Sequence: Synthetic primer
cacaccttcaggcactatgcctacctccgagacagtcttt

SEQ ID NO: 32397 - DNA, 40 bp, Artificial Sequence
  Description of Artificial Sequence: Synthetic primer
tggacctctatcgcctctatgtgtctgtgaaggagattgg

SEQ ID NO: 32398 - DNA, 40 bp, Artificial Sequence
  Description of Artificial Sequence: Synthetic primer
cagcttgaagaacctcctctcatcagctgcgctgggtctg

SEQ ID NO: 32399 - DNA, 40 bp, Artificial Sequence
  Description of Artificial Sequence: Synthetic primer
ttccgttagaatccgttatgaagcccctcgtgtaaacaac

SEQ ID NO: 32400 - DNA, 40 bp, Artificial Sequence
  Description of Artificial Sequence: Synthetic primer
catcagcagtaacatacccaatagcccactgacccagacg

SEQ ID NO: 32401 - DNA, 40 bp, Artificial Sequence
  Description of Artificial Sequence: Synthetic primer
gccagagaacagagaccccgcccgggcttgggcagtattg

SEQ ID NO: 32402 - DNA, 40 bp, Artificial Sequence
  Description of Artificial Sequence: Synthetic primer
tttttatattccttgtgtgaggggtgtctgtgatatttgg

SEQ ID NO: 32403 - DNA, 40 bp, Artificial Sequence
  Description of Artificial Sequence: Synthetic primer
gagccgatgaacaaggctgtggatttcagagacccgagac

SEQ ID NO: 32404 - DNA, 40 bp, Artificial Sequence
  Description of Artificial Sequence: Synthetic primer
catggccatgagcaagaccagcaaataacagctttttgcc

SEQ ID NO: 32405 - DNA, 40 bp, Artificial Sequence
  Description of Artificial Sequence: Synthetic primer
atgcaaagcaatatcttgttcaggttagtacccgcaaaac

SEQ ID NO: 32406 - DNA, 40 bp, Artificial Sequence
  Description of Artificial Sequence: Synthetic primer
aagatatttttcaacacttaattggtgcaacaaatgtgtc

SEQ ID NO: 32407 - DNA, 40 bp, Artificial Sequence
  Description of Artificial Sequence: Synthetic primer
tttcaggccttctttcagagccatcatacgagatcttaac

SEQ ID NO: 32408 - DNA, 40 bp, Artificial Sequence
  Description of Artificial Sequence: Synthetic primer
ccaggccgaagggcaaggggggaggaggctgaagcctggg

SEQ ID NO: 32409 - DNA, 40 bp, Artificial Sequence
  Description of Artificial Sequence: Synthetic primer
gcccttctaccagcccgtggacgcaatcaaattgaacctg

SEQ ID NO: 32410 - DNA, 40 bp, Artificial Sequence
  Description of Artificial Sequence: Synthetic primer
agacttctactactggttctttgggagtcccaagcactgg

SEQ ID NO: 32411 - DNA, 40 bp, Artificial Sequence
  Description of Artificial Sequence: Synthetic primer
ctgctgctgcggcgttcaagagagactggggggcccacgc

SEQ ID NO: 32412 - DNA, 40 bp, Artificial Sequence
  Description of Artificial Sequence: Synthetic primer
gaaatatgagagcagatttgcagagaccatcatgtcagag

SEQ ID NO: 32413 - DNA, 40 bp, Artificial Sequence
  Description of Artificial Sequence: Synthetic primer
tgcaagaggcactggctcatgccctgacggaaaaggaagg

SEQ ID NO: 32414 - DNA, 40 bp, Artificial Sequence
  Description of Artificial Sequence: Synthetic primer
gccctctcccggctggctgggcttggcagcgtcactgttc

SEQ ID NO: 32415 - DNA, 40 bp, Artificial Sequence
  Description of Artificial Sequence: Synthetic primer
accatagcactaacccatgctgggtcatagaagagtgtgg

SEQ ID NO: 32416 - DNA, 40 bp, Artificial Sequence
  Description of Artificial Sequence: Synthetic primer
tgcccttgagtttcattggataaatctgatcttttgagag

SEQ ID NO: 32417 - DNA, 40 bp, Artificial Sequence
  Description of Artificial Sequence: Synthetic primer
ttctcccaagacagcagggaagtgccagaggctccgtgtg

SEQ ID NO: 32418 - DNA, 40 bp, Artificial Sequence
  Description of Artificial Sequence: Synthetic primer
tcctctctccagttttaaggcaagtaagagggggctgtgg

SEQ ID NO: 32419 - DNA, 40 bp, Artificial Sequence
  Description of Artificial Sequence: Synthetic primer
ctcctcagccaggtctccggctgccgctacaccgcgaagg

SEQ ID NO: 32420 - DNA, 40 bp, Artificial Sequence
  Description of Artificial Sequence: Synthetic primer
ggagggtggggaggagtcctgggtctcaggcctcagtgac

SEQ ID NO: 32421 - DNA, 40 bp, Artificial Sequence
  Description of Artificial Sequence: Synthetic primer
caaattttcagcacacctgccagcaacttgggggaataag

SEQ ID NO: 32422 - DNA, 40 bp, Artificial Sequence
  Description of Artificial Sequence: Synthetic primer
ccacgagaatattgtgaacctgctgggggcgtgcacactg

SEQ ID NO: 32423 - DNA, 40 bp, Artificial Sequence
  Description of Artificial Sequence: Synthetic primer
tggtcccctgccccctctgtcccgtccccctgcccaagtg

SEQ ID NO: 32424 - DNA, 40 bp, Artificial Sequence
  Description of Artificial Sequence: Synthetic primer
actgtccctcaggagggggtcgaacttgaggtataaggac

SEQ ID NO: 32425 - DNA, 40 bp, Artificial Sequence
  Description of Artificial Sequence: Synthetic primer
gttctagtttctgtatttcctgttggaatacatctctctc

SEQ ID NO: 32426 - DNA, 40 bp, Artificial Sequence
  Description of Artificial Sequence: Synthetic primer
atgctccagggtcttcagccctgacatctccaggtccatc

SEQ ID NO: 32427 - DNA, 40 bp, Artificial Sequence
  Description of Artificial Sequence: Synthetic primer
gtatctcagaatgagagtgaaaacgaaggccacctcaatc

SEQ ID NO: 32428 - DNA, 40 bp, Artificial Sequence
  Description of Artificial Sequence: Synthetic primer
gataacagcttttgaggaacttcgtgtgcaagctgagaat

SEQ ID NO: 32429 - DNA, 40 bp, Artificial Sequence
  Description of Artificial Sequence: Synthetic primer
caaatgtgctggggacccctaattgggaagtgctttcctc

SEQ ID NO: 32430 - DNA, 40 bp, Artificial Sequence
  Description of Artificial Sequence: Synthetic primer
ttacagccactgccaaggcaaccgatggagacgcagtaag

SEQ ID NO: 32431 - DNA, 40 bp, Artificial Sequence
  Description of Artificial Sequence: Synthetic primer
gctcagaatcacatggtattatagaaggggttggttgtcc

SEQ ID NO: 32432 - DNA, 40 bp, Artificial Sequence
  Description of Artificial Sequence: Synthetic primer
tgtgccgaatcatgaatactagtcaagtcacacactctgg

SEQ ID NO: 32433 - DNA, 40 bp, Artificial Sequence
  Description of Artificial Sequence: Synthetic primer
tgtgccaatgtctgtgtgctcccagcagaccagcaagact

SEQ ID NO: 32434 - DNA, 40 bp, Artificial Sequence
  Description of Artificial Sequence: Synthetic primer
gcttgttgatctttttcatggcaaagcgctgccgcgtgtc

SEQ ID NO: 32435 - DNA, 40 bp, Artificial Sequence
  Description of Artificial Sequence: Synthetic primer
aaatgaagagagatgatggcgtggaagaacacggtgactc

SEQ ID NO: 32436 - DNA, 40 bp, Artificial Sequence
  Description of Artificial Sequence: Synthetic primer
tgaaacatttgcctacgtcactgttctctttttcaatgac

SEQ ID NO: 32437 - DNA, 40 bp, Artificial Sequence
  Description of Artificial Sequence: Synthetic primer
aatcctgccttctacatcagttcccatttatgctgaaaac

SEQ ID NO: 32438 - DNA, 40 bp, Artificial Sequence
  Description of Artificial Sequence: Synthetic primer
aaggcactctcttcttcctccctcttcggtagacgcacat

SEQ ID NO: 32439 - DNA, 40 bp, Artificial Sequence
  Description of Artificial Sequence: Synthetic primer
gttattagattgattgctaattttaccattactagcctac

SEQ ID NO: 32440 - DNA, 40 bp, Artificial Sequence
  Description of Artificial Sequence: Synthetic primer
ggccgataaaagcagcctggtgatccagtggcgggacacg

SEQ ID NO: 32441 - DNA, 40 bp, Artificial Sequence
  Description of Artificial Sequence: Synthetic primer
caaaggaagttttaaaggccgttggctgtgctgtattttg

SEQ ID NO: 32442 - DNA, 40 bp, Artificial Sequence
  Description of Artificial Sequence: Synthetic primer
gggggggtcctcggaccactccccgaggcccgtgctgatg

SEQ ID NO: 32443 - DNA, 40 bp, Artificial Sequence
  Description of Artificial Sequence: Synthetic primer
ttggaaggatagagggtaatgaaagctggcagaggattag

SEQ ID NO: 32444 - DNA, 40 bp, Artificial Sequence
  Description of Artificial Sequence: Synthetic primer
tcacctccaggctgtccggggcgcagcggaagggcagacc

SEQ ID NO: 32445 - DNA, 40 bp, Artificial Sequence
  Description of Artificial Sequence: Synthetic primer
gcaagagctgcacggtttcttggcactcggtgttcactgc

SEQ ID NO: 32446 - DNA, 40 bp, Artificial Sequence
  Description of Artificial Sequence: Synthetic primer
caacgtcctgaagcaggtcaaccacccacatgtcatcaaa

SEQ ID NO: 32447 - DNA, 40 bp, Artificial Sequence
  Description of Artificial Sequence: Synthetic primer
taaggagccttggaggcttgtgaaaaagacgtccacaaag

SEQ ID NO: 32448 - DNA, 40 bp, Artificial Sequence
  Description of Artificial Sequence: Synthetic primer
gtgtgtttcagcaaaagagggcctatcggcagggctccac

SEQ ID NO: 32449 - DNA, 40 bp, Artificial Sequence
  Description of Artificial Sequence: Synthetic primer
atttttggagacacccaggactaatggatactgtagtaga

SEQ ID NO: 32450 - DNA, 40 bp, Artificial Sequence
  Description of Artificial Sequence: Synthetic primer
cctcatttcttgtttaattttcctaatagccccaagaaag

SEQ ID NO: 32451 - DNA, 40 bp, Artificial Sequence
  Description of Artificial Sequence: Synthetic primer
gctatatattttgcatactttaaaatcacctaacttggac

SEQ ID NO: 32452 - DNA, 40 bp, Artificial Sequence
  Description of Artificial Sequence: Synthetic primer
ggtcccgctgctccctactggctacgacgtcgtttcttcc

SEQ ID NO: 32453 - DNA, 40 bp, Artificial Sequence
  Description of Artificial Sequence: Synthetic primer
acgccagcacctgccagactcaggggattacggtgactgg

SEQ ID NO: 32454 - DNA, 40 bp, Artificial Sequence
  Description of Artificial Sequence: Synthetic primer
ctgggatccttggcaatggggaaaaggtgccatttgcttc

SEQ ID NO: 32455 - DNA, 40 bp, Artificial Sequence
  Description of Artificial Sequence: Synthetic primer
acttgacgttgtccacctccagcacttcttcctcacacag

SEQ ID NO: 32456 - DNA, 40 bp, Artificial Sequence
  Description of Artificial Sequence: Synthetic primer
tcttcgtacgcctttaaaaatctttgtaaaagtgccttgg

SEQ ID NO: 32457 - DNA, 40 bp, Artificial Sequence
  Description of Artificial Sequence: Synthetic primer
gcgggctccaagcacaggggaatcctttctctctcctagc

SEQ ID NO: 32458 - DNA, 40 bp, Artificial Sequence
  Description of Artificial Sequence: Synthetic primer
ctcctgctgtcccacggttttgtggccttaagcctcttcg

SEQ ID NO: 32459 - DNA, 40 bp, Artificial Sequence
  Description of Artificial Sequence: Synthetic primer
catgcaggtgggtcatcatggcttgcaggcgttctttgtc

SEQ ID NO: 32460 - DNA, 40 bp, Artificial Sequence
  Description of Artificial Sequence: Synthetic primer
tagcatggatcccggtacactttcaatacttaataaatgg

SEQ ID NO: 32461 - DNA, 40 bp, Artificial Sequence
  Description of Artificial Sequence: Synthetic primer
tcactgtagctagaccaaaatcacctatttttactgtgag

SEQ ID NO: 32462 - DNA, 40 bp, Artificial Sequence
  Description of Artificial Sequence: Synthetic primer
atttctggcacatactcactaacccgggttaagacatctg

SEQ ID NO: 32463 - DNA, 40 bp, Artificial Sequence
  Description of Artificial Sequence: Synthetic primer
ggaaagagcccgtgaagatcgcggcgccggagttgcataa

SEQ ID NO: 32464 - DNA, 40 bp, Artificial Sequence
  Description of Artificial Sequence: Synthetic primer
gcgtgccctacttcaaggataagggcgacagcaacagctc

SEQ ID NO: 32465 - DNA, 40 bp, Artificial Sequence
  Description of Artificial Sequence: Synthetic primer
accccctcaggtacagacccaggctcttcgagactttgag

SEQ ID NO: 32466 - DNA, 40 bp, Artificial Sequence
  Description of Artificial Sequence: Synthetic primer
ctttgaagtgtggagcgggaaaggagcagtttctgagctg

SEQ ID NO: 32467 - DNA, 40 bp, Artificial Sequence
  Description of Artificial Sequence: Synthetic primer
gaaatgtgagcatttctaaacttggtaccaaatggaaagg

SEQ ID NO: 32468 - DNA, 40 bp, Artificial Sequence
  Description of Artificial Sequence: Synthetic primer
aggcagcttcgggtcagccatggttgtgtcagcaaaattc

SEQ ID NO: 32469 - DNA, 40 bp, Artificial Sequence
  Description of Artificial Sequence: Synthetic primer
cacctgggccgctctggagggactctccttctcaccgttc

SEQ ID NO: 32470 - DNA, 40 bp, Artificial Sequence
  Description of Artificial Sequence: Synthetic primer
gcggaggaggcggcagtggcgagctggggggaggggggac

SEQ ID NO: 32471 - DNA, 40 bp, Artificial Sequence
  Description of Artificial Sequence: Synthetic primer
gctgtacttttaattacttcatattcattgttcaatttta

SEQ ID NO: 32472 - DNA, 40 bp, Artificial Sequence
  Description of Artificial Sequence: Synthetic primer
tgttctagacttggagtgggatcagcatctggaacaaaag

SEQ ID NO: 32473 - DNA, 40 bp, Artificial Sequence
  Description of Artificial Sequence: Synthetic primer
ccccccacggcctggcccggccggaggcgctttactaccc

SEQ ID NO: 32474 - DNA, 40 bp, Artificial Sequence
  Description of Artificial Sequence: Synthetic primer
ggaaaactagaccaactacactgggaagcagtcaattcag

SEQ ID NO: 32475 - DNA, 40 bp, Artificial Sequence
  Description of Artificial Sequence: Synthetic primer
cttagtttactgccttcaacacaaggacaggagagggaaa

SEQ ID NO: 32476 - DNA, 40 bp, Artificial Sequence
  Description of Artificial Sequence: Synthetic primer
ccagtattattttgtgttgccagctggtgagcacttggac

SEQ ID NO: 32477 - DNA, 40 bp, Artificial Sequence
  Description of Artificial Sequence: Synthetic primer
cctgtaaatgttaagaatagaaccaaagagagggccacag

SEQ ID NO: 32478 - DNA, 40 bp, Artificial Sequence
  Description of Artificial Sequence: Synthetic primer
cggagcggtggggagagagcggggccgctcgccgcacccc

SEQ ID NO: 32479 - DNA, 40 bp, Artificial Sequence
  Description of Artificial Sequence: Synthetic primer
cagagatgcaaaaggaaaatagaagcaactggagtgatac

SEQ ID NO: 32480 - DNA, 40 bp, Artificial Sequence
  Description of Artificial Sequence: Synthetic primer
taacctcaccagctcttctgaaacctgttcccgtgactgc

SEQ ID NO: 32481 - DNA, 40 bp, Artificial Sequence
  Description of Artificial Sequence: Synthetic primer
ggtggggccactcactggtactggccctttagtgctttgc

SEQ ID NO: 32482 - DNA, 40 bp, Artificial Sequence
  Description of Artificial Sequence: Synthetic primer
gtgcggatcctcacggccttttcctccctgcagcatctgg

SEQ ID NO: 32483 - DNA, 40 bp, Artificial Sequence
  Description of Artificial Sequence: Synthetic primer
gagatgtgcttgactggaacacccgatcaaatgcataagg

SEQ ID NO: 32484 - DNA, 40 bp, Artificial Sequence
  Description of Artificial Sequence: Synthetic primer
gggctcattttcctgattgtggaagtctggagaagtgtca

SEQ ID NO: 32485 - DNA, 40 bp, Artificial Sequence
  Description of Artificial Sequence: Synthetic primer
atcagtaccaccactgtaacactgctcaccattgctgctc

SEQ ID NO: 32486 - DNA, 40 bp, Artificial Sequence
  Description of Artificial Sequence: Synthetic primer
gggagcggaaggcgaagccctgaggggtggcggaccgagt

SEQ ID NO: 32487 - DNA, 40 bp, Artificial Sequence
  Description of Artificial Sequence: Synthetic primer
actgaaaaaatgctgcaggacaaagtgaacaagacttcca

SEQ ID NO: 32488 - DNA, 40 bp, Artificial Sequence
  Description of Artificial Sequence: Synthetic primer
ttctctatccagatcatcaaggggcattttctgtcttatg

SEQ ID NO: 32489 - DNA, 40 bp, Artificial Sequence
  Description of Artificial Sequence: Synthetic primer
ggagaaggtggtcttctggctgcacgacagcttccccaag

SEQ ID NO: 32490 - DNA, 40 bp, Artificial Sequence
  Description of Artificial Sequence: Synthetic primer
cttagctaagttcttcgcatagtcttcttcaatctttatc

SEQ ID NO: 32491 - DNA, 40 bp, Artificial Sequence
  Description of Artificial Sequence: Synthetic primer
aaaaagtaggtattctccagcttgggtttctgtcattttc

SEQ ID NO: 32492 - DNA, 40 bp, Artificial Sequence
  Description of Artificial Sequence: Synthetic primer
tatcgcagccgtgaactcctgtcagctcgccccggcacag

SEQ ID NO: 32493 - DNA, 40 bp, Artificial Sequence
  Description of Artificial Sequence: Synthetic primer
acccataacaaggctgggtcgattggcttgaccaggacag

SEQ ID NO: 32494 - DNA, 40 bp, Artificial Sequence
  Description of Artificial Sequence: Synthetic primer
ctcttccacctaccaccgccagcgcaggcatagcgatttc

SEQ ID NO: 32495 - DNA, 40 bp, Artificial Sequence
  Description of Artificial Sequence: Synthetic primer
ccgagtcgcgagtgtgcgccgtccgccgcccgccggatcc

SEQ ID NO: 32496 - DNA, 40 bp, Artificial Sequence
  Description of Artificial Sequence: Synthetic primer
agaaccaggagaagtttttatcaacaaaggcaaaggattc

SEQ ID NO: 32497 - DNA, 40 bp, Artificial Sequence
  Description of Artificial Sequence: Synthetic primer
agaaccccaaggacaagaggcatgtctggttcggcgagag

SEQ ID NO: 32498 - DNA, 40 bp, Artificial Sequence
  Description of Artificial Sequence: Synthetic primer
ttccaatgcatcagctaccgtaagacgttcccacttgtcc

SEQ ID NO: 32499 - DNA, 40 bp, Artificial Sequence
  Description of Artificial Sequence: Synthetic primer
cattacaaaagcctccatttcggcacccgcctgggcactc

SEQ ID NO: 32500 - DNA, 40 bp, Artificial Sequence
  Description of Artificial Sequence: Synthetic primer
cagcaacgtcactcagttgtccaaagtcccacaccagagg

SEQ ID NO: 32501 - DNA, 40 bp, Artificial Sequence
  Description of Artificial Sequence: Synthetic primer
tgagaaggagaaggcccgcctggaggaggagcgggagagg

SEQ ID NO: 32502 - DNA, 40 bp, Artificial Sequence
  Description of Artificial Sequence: Synthetic primer
cgggcgtgcaccctcggctggaagtttgtgccgggccccg

SEQ ID NO: 32503 - DNA, 40 bp, Artificial Sequence
  Description of Artificial Sequence: Synthetic primer
cagggctctggacattttctcataggtcatgtttgttctg

SEQ ID NO: 32504 - DNA, 40 bp, Artificial Sequence
  Description of Artificial Sequence: Synthetic primer
cttaacttccaggcaaaccctctccccaccctgccataag

SEQ ID NO: 32505 - DNA, 40 bp, Artificial Sequence
  Description of Artificial Sequence: Synthetic primer
aagtcccagggactgggaacagtttgaatataaaattcag

SEQ ID NO: 32506 - DNA, 40 bp, Artificial Sequence
  Description of Artificial Sequence: Synthetic primer
tttcattgcaaacagcaaggcagtatagcccacactcagc

SEQ ID NO: 32507 - DNA, 40 bp, Artificial Sequence
  Description of Artificial Sequence: Synthetic primer
cggagcggcggctgccatttttctgcgccggaagcgtcac

SEQ ID NO: 32508 - DNA, 40 bp, Artificial Sequence
  Description of Artificial Sequence: Synthetic primer
cacgaacatgtcactcaggacctgcggagccatctagtgc

SEQ ID NO: 32509 - DNA, 40 bp, Artificial Sequence
  Description of Artificial Sequence: Synthetic primer
cctctactttcccaagagaaacatattcccctgcctgtag

SEQ ID NO: 32510 - DNA, 40 bp, Artificial Sequence
  Description of Artificial Sequence: Synthetic primer
aagaagatttctcaactgggttattcttgcttctatattc

SEQ ID NO: 32511 - DNA, 40 bp, Artificial Sequence
  Description of Artificial Sequence: Synthetic primer
ttgtatcatagtccccatcatgttcttcttagtcacatgc

SEQ ID NO: 32512 - DNA, 40 bp, Artificial Sequence
  Description of Artificial Sequence: Synthetic primer
gtgcaaatccagagccagcgtcggttgcctcgagtaattc

SEQ ID NO: 32513 - DNA, 40 bp, Artificial Sequence
  Description of Artificial Sequence: Synthetic primer
aaactagacaaagaaggtgtgttctgaagagctgtgtatc

SEQ ID NO: 32514 - DNA, 40 bp, Artificial Sequence
  Description of Artificial Sequence: Synthetic primer
cagcaggggactcctgacacttccccttccccaccgaacc

SEQ ID NO: 32515 - DNA, 40 bp, Artificial Sequence
  Description of Artificial Sequence: Synthetic primer
tcttcactcgattgttggtggtgaacatagggaaggcatc

SEQ ID NO: 32516 - DNA, 40 bp, Artificial Sequence
  Description of Artificial Sequence: Synthetic primer
aattctgttgacccgcactttaaagcttttgtttgcattt

SEQ ID NO: 32517 - DNA, 40 bp, Artificial Sequence
  Description of Artificial Sequence: Synthetic primer
tttgtgttaagatgaagatttgtctctgtatccagttgtc

SEQ ID NO: 32518 - DNA, 40 bp, Artificial Sequence
  Description of Artificial Sequence: Synthetic primer
gcctgtcccaggactcaccctccacaaagcaaaggcagtc

SEQ ID NO: 32519 - DNA, 40 bp, Artificial Sequence
  Description of Artificial Sequence: Synthetic primer
ccggagagaagaggattggtcctgcttttaagcctagctg

SEQ ID NO: 32520 - DNA, 40 bp, Artificial Sequence
  Description of Artificial Sequence: Synthetic primer
gaaatgtgatggtgtttataataaaagatggtaaaactac

SEQ ID NO: 32521 - DNA, 40 bp, Artificial Sequence
  Description of Artificial Sequence: Synthetic primer
ccccagagtcggcaaccaccgttaagtcacttatcaagtc

SEQ ID NO: 32522 - DNA, 40 bp, Artificial Sequence
  Description of Artificial Sequence: Synthetic primer
accaacagcaccaggactgcagcagccaccgtgagttcag

SEQ ID NO: 32523 - DNA, 40 bp, Artificial Sequence
  Description of Artificial Sequence: Synthetic primer
agagctcaagatgcagctggccaagaaggaggaggagctg

SEQ ID NO: 32524 - DNA, 40 bp, Artificial Sequence
  Description of Artificial Sequence: Synthetic primer
ctgttggcataggacccagggagggcacactggcattttc

SEQ ID NO: 32525 - DNA, 40 bp, Artificial Sequence
  Description of Artificial Sequence: Synthetic primer
catgctcatcagctttgactatcctttcaaacatggcatc

SEQ ID NO: 32526 - DNA, 40 bp, Artificial Sequence
  Description of Artificial Sequence: Synthetic primer
agatactggctactggaatgtaagtactttttcactgctg

SEQ ID NO: 32527 - DNA, 40 bp, Artificial Sequence
  Description of Artificial Sequence: Synthetic primer
cttcgaatctctagagcctgtttgcctttggtaaggtgac

SEQ ID NO: 32528 - DNA, 40 bp, Artificial Sequence
  Description of Artificial Sequence: Synthetic primer
gtccacattccaggcttcaggcatgagacactggtcttcc

SEQ ID NO: 32529 - DNA, 40 bp, Artificial Sequence
  Description of Artificial Sequence: Synthetic primer
tcatggtccagcacaaatttaagaatgacagccaactcag

SEQ ID NO: 32530 - DNA, 40 bp, Artificial Sequence
  Description of Artificial Sequence: Synthetic primer
ctggactgaatttcatatttaatcttccctgcccacaaag

SEQ ID NO: 32531 - DNA, 40 bp, Artificial Sequence
  Description of Artificial Sequence: Synthetic primer
tgaaaagggctacatttgggaagctgggaaaggcctccag

SEQ ID NO: 32532 - DNA, 40 bp, Artificial Sequence
  Description of Artificial Sequence: Synthetic primer
tggcaagtaattttgcaactttcaagtgcgttctttagac

SEQ ID NO: 32533 - DNA, 40 bp, Artificial Sequence
  Description of Artificial Sequence: Synthetic primer
acccatgctgccgacgtcctgcacgccaccgctttctttc

SEQ ID NO: 32534 - DNA, 40 bp, Artificial Sequence
  Description of Artificial Sequence: Synthetic primer
gtgtactttgttgctatttaaaactgtatcaactctaacg

SEQ ID NO: 32535 - DNA, 40 bp, Artificial Sequence
  Description of Artificial Sequence: Synthetic primer
atgctctgtagctttattctcttcatagttgggatagacc

SEQ ID NO: 32536 - DNA, 40 bp, Artificial Sequence
  Description of Artificial Sequence: Synthetic primer
aacagacttccctgtggagcctgtcctcggctgttccttc

SEQ ID NO: 32537 - DNA, 40 bp, Artificial Sequence
  Description of Artificial Sequence: Synthetic primer
ataagacatgtagttgctacccttttgggcctttatcttg

SEQ ID NO: 32538 - DNA, 40 bp, Artificial Sequence
  Description of Artificial Sequence: Synthetic primer
gtgtccaggaggaccaggaaggagttgagggaaccttctg

SEQ ID NO: 32539 - DNA, 40 bp, Artificial Sequence
  Description of Artificial Sequence: Synthetic primer
tctgtgttctctcattatggactttgtgaagtagaaacat

SEQ ID NO: 32540 - DNA, 40 bp, Artificial Sequence
  Description of Artificial Sequence: Synthetic primer
aaaaagaggattggtcatagcagatccttagggcacagag

SEQ ID NO: 32541 - DNA, 40 bp, Artificial Sequence
  Description of Artificial Sequence: Synthetic primer
aaagactcagagccggggggcaccagtgcagtgactgcgg

SEQ ID NO: 32542 - DNA, 40 bp, Artificial Sequence
  Description of Artificial Sequence: Synthetic primer
taatagaacaaactaaagcaccaaaggcaatgactccttc

SEQ ID NO: 32543 - DNA, 40 bp, Artificial Sequence
  Description of Artificial Sequence: Synthetic primer
gtcaggatgaggccccgccttttcccccaccctcccatga

SEQ ID NO: 32544 - DNA, 40 bp, Artificial Sequence
  Description of Artificial Sequence: Synthetic primer
atatgggaaagattcagacatttccccagaatccacaaac

SEQ ID NO: 32545 - DNA, 40 bp, Artificial Sequence
  Description of Artificial Sequence: Synthetic primer
aatgaaacagcaacaggtgatgatggagatgaagtatttg

SEQ ID NO: 32546 - DNA, 40 bp, Artificial Sequence
  Description of Artificial Sequence: Synthetic primer
aagaggtttctttatgtggggcttcttcttttcttcttcc

SEQ ID NO: 32547 - DNA, 40 bp, Artificial Sequence
  Description of Artificial Sequence: Synthetic primer
gaatttggtgttgaacagggtgtccatgagggtggacttg

SEQ ID NO: 32548 - DNA, 40 bp, Artificial Sequence
  Description of Artificial Sequence: Synthetic primer
tttgtacagttttgaaggggtgccccctattcacgcctac

SEQ ID NO: 32549 - DNA, 40 bp, Artificial Sequence
  Description of Artificial Sequence: Synthetic primer
ggaataaaacttcaggaaaaaggaggtagcgtatcatgtc

SEQ ID NO: 32550 - DNA, 40 bp, Artificial Sequence
  Description of Artificial Sequence: Synthetic primer
atcaaaatattcagaaattgctctactgaccatttccaac

SEQ ID NO: 32551 - DNA, 40 bp, Artificial Sequence
  Description of Artificial Sequence: Synthetic primer
tgccctggtcaccaacaaacccagagctgcctcagcttat

SEQ ID NO: 32552 - DNA, 40 bp, Artificial Sequence
  Description of Artificial Sequence: Synthetic primer
atgccacgaaaatctcacgtgcttcggggaactgggtttc

SEQ ID NO: 32553 - DNA, 40 bp, Artificial Sequence
  Description of Artificial Sequence: Synthetic primer
tcggaggaacaagcgaccctccgccaaggagggccaggag

SEQ ID NO: 32554 - DNA, 40 bp, Artificial Sequence
  Description of Artificial Sequence: Synthetic primer
atgctgccctgcgtaatcattcatttcgttcaggttggaa

SEQ ID NO: 32555 - DNA, 40 bp, Artificial Sequence
  Description of Artificial Sequence: Synthetic primer
gacactgccttttgaagttttccaatgagcagatgtaaag

SEQ ID NO: 32556 - DNA, 40 bp, Artificial Sequence
  Description of Artificial Sequence: Synthetic primer
atttcactaatattctctttatgtttccgttgcacttcag

SEQ ID NO: 32557 - DNA, 40 bp, Artificial Sequence
  Description of Artificial Sequence: Synthetic primer
ctcggctggggcccagttgcaggtactgggatttctggag

SEQ ID NO: 32558 - DNA, 40 bp, Artificial Sequence
  Description of Artificial Sequence: Synthetic primer
cgggctgtggggcctccgcgccgcggccgttagtcatgtc

SEQ ID NO: 32559 - DNA, 40 bp, Artificial Sequence
  Description of Artificial Sequence: Synthetic primer
tttacaactttgctcctaactgtgggttgaaaactctagc

SEQ ID NO: 32560 - DNA, 40 bp, Artificial Sequence
  Description of Artificial Sequence: Synthetic primer
cccgggcgcggtagcccgccctcccgccactgagcagccg

SEQ ID NO: 32561 - DNA, 40 bp, Artificial Sequence
  Description of Artificial Sequence: Synthetic primer
gcaaaaggatcagtgaggcctgctctctggcccagcagtc

SEQ ID NO: 32562 - DNA, 40 bp, Artificial Sequence
  Description of Artificial Sequence: Synthetic primer
acaatgctctcaagctagctcacaaagacaccaaagtttc

SEQ ID NO: 32563 - DNA, 40 bp, Artificial Sequence
  Description of Artificial Sequence: Synthetic primer
cacactccgcgtgcctcctgctccgaccccgaggagaaac

SEQ ID NO: 32564 - DNA, 40 bp, Artificial Sequence
  Description of Artificial Sequence: Synthetic primer
taatctcccgattatcaaaaacaatgggcaagtctacaca

SEQ ID NO: 32565 - DNA, 40 bp, Artificial Sequence
  Description of Artificial Sequence: Synthetic primer
tctcaggaagttgaagacaaaactaaggaatatgaattgc

SEQ ID NO: 32566 - DNA, 40 bp, Artificial Sequence
  Description of Artificial Sequence: Synthetic primer
ctttgtggctatcatcaaaatcaccaaccaaaagattcac

SEQ ID NO: 32567 - DNA, 40 bp, Artificial Sequence
  Description of Artificial Sequence: Synthetic primer
gaaatggagaggcctgtaaatagaggaggcagccgaagtc

SEQ ID NO: 32568 - DNA, 40 bp, Artificial Sequence
  Description of Artificial Sequence: Synthetic primer
gcctccgcagggcgatggagcccggtctgcaaggaaagtg

SEQ ID NO: 32569 - DNA, 40 bp, Artificial Sequence
  Description of Artificial Sequence: Synthetic primer
ctgaggaagatcgatccaagtcagcacccacctccccttg

SEQ ID NO: 32570 - DNA, 40 bp, Artificial Sequence
  Description of Artificial Sequence: Synthetic primer
ccgttcccacctggcctggagagctcagtctggggcacta

SEQ ID NO: 32571 - DNA, 40 bp, Artificial Sequence
  Description of Artificial Sequence: Synthetic primer
catcattcacatcttggacagcaaatttcacatactgatg

SEQ ID NO: 32572 - DNA, 40 bp, Artificial Sequence
  Description of Artificial Sequence: Synthetic primer
tgtcaacttttctcttgagctacaggcccagttttatcac

SEQ ID NO: 32573 - DNA, 40 bp, Artificial Sequence
  Description of Artificial Sequence: Synthetic primer
gctgatgagggcagtccagggcgctcttgttctgggacag

SEQ ID NO: 32574 - DNA, 40 bp, Artificial Sequence
  Description of Artificial Sequence: Synthetic primer
atgcatgaacaatggctggacctcctagagtggcatataa

SEQ ID NO: 32575 - DNA, 40 bp, Artificial Sequence
  Description of Artificial Sequence: Synthetic primer
atgagcttccacacactgagaagtgtccgagaaattggtg

SEQ ID NO: 32576 - DNA, 40 bp, Artificial Sequence
  Description of Artificial Sequence: Synthetic primer
gagggcacaaggagacgcgggagcggagcatgtcggagac

SEQ ID NO: 32577 - DNA, 40 bp, Artificial Sequence
  Description of Artificial Sequence: Synthetic primer
tcctctactctgataaagcacttatgcagtgagaggttgg

SEQ ID NO: 32578 - DNA, 40 bp, Artificial Sequence
  Description of Artificial Sequence: Synthetic primer
gtaacttctctccaggctgaagggcggcgaggcatagtcc

SEQ ID NO: 32579 - DNA, 40 bp, Artificial Sequence
  Description of Artificial Sequence: Synthetic primer
ctttgataaggttttcctttccctttttcgttaactcttt

SEQ ID NO: 32580 - DNA, 40 bp, Artificial Sequence
  Description of Artificial Sequence: Synthetic primer
gcagtttcatacagacaagttgcatttgatttcacaaaag

SEQ ID NO: 32581 - DNA, 40 bp, Artificial Sequence
  Description of Artificial Sequence: Synthetic primer
cagagatggctctagtctcttcactctcacctcatttaag

SEQ ID NO: 32582 - DNA, 40 bp, Artificial Sequence
  Description of Artificial Sequence: Synthetic primer
ggtcaccacacctgagagtggtcctggggctggccctgtg

SEQ ID NO: 32583 - DNA, 40 bp, Artificial Sequence
  Description of Artificial Sequence: Synthetic primer
gtgtcgaacaaccttctacacagcgctcactcgccttctg

SEQ ID NO: 32584 - DNA, 40 bp, Artificial Sequence
  Description of Artificial Sequence: Synthetic primer
ttggtgttctgggattattttaaaagacaaaagggtaaag

SEQ ID NO: 32585 - DNA, 40 bp, Artificial Sequence
  Description of Artificial Sequence: Synthetic primer
gatattaaaggtcatttcctgggcaaattccttctgatac

SEQ ID NO: 32586 - DNA, 40 bp, Artificial Sequence
  Description of Artificial Sequence: Synthetic primer
ggtgctatacgggttgagggacttccgacaagtgattgag

SEQ ID NO: 32587 - DNA, 40 bp, Artificial Sequence
  Description of Artificial Sequence: Synthetic primer
tccgggcggtgaggaggactcggggcgagggcgggcaagg

SEQ ID NO: 32588 - DNA, 40 bp, Artificial Sequence
  Description of Artificial Sequence: Synthetic primer
aaaaatgggataatagatgattttatcagtatacctgtgg

SEQ ID NO: 32589 - DNA, 40 bp, Artificial Sequence
  Description of Artificial Sequence: Synthetic primer
tggaacctggggccaccactgctccaggcccttgcgatta

SEQ ID NO: 32590 - DNA, 40 bp, Artificial Sequence
  Description of Artificial Sequence: Synthetic primer
caccaacagataagaagcagaaagttgagcgcattgcatc

SEQ ID NO: 32591 - DNA, 40 bp, Artificial Sequence
  Description of Artificial Sequence: Synthetic primer
atcagcttctgattattgtggactcagatgtcagtgatgc

SEQ ID NO: 32592 - DNA, 40 bp, Artificial Sequence
  Description of Artificial Sequence: Synthetic primer
tatagtcattaggaactgttgggggtttaacaggttccag

SEQ ID NO: 32593 - DNA, 40 bp, Artificial Sequence
  Description of Artificial Sequence: Synthetic primer
tcaaataacactagaggaaatgccaataaaacacagaaag

SEQ ID NO: 32594 - DNA, 40 bp, Artificial Sequence
  Description of Artificial Sequence: Synthetic primer
tactgtgctgaaagtcagcccacgtcggagcggtgaggag

SEQ ID NO: 32595 - DNA, 40 bp, Artificial Sequence
  Description of Artificial Sequence: Synthetic primer
gctgtctttagctggaagagagaagctgtgttgtgagctg

SEQ ID NO: 32596 - DNA, 40 bp, Artificial Sequence
  Description of Artificial Sequence: Synthetic primer
gctggggtcctaccgtgatagtgcagaaaatgaagaatgc

SEQ ID NO: 32597 - DNA, 40 bp, Artificial Sequence
  Description of Artificial Sequence: Synthetic primer
cagcttcatatgcaactgtaccccggctggtccgcgcggg

SEQ ID NO: 32598 - DNA, 40 bp, Artificial Sequence
  Description of Artificial Sequence: Synthetic primer
tgatgtaaaatcaagacacacagtgttaactctacacagc

SEQ ID NO: 32599 - DNA, 40 bp, Artificial Sequence
  Description of Artificial Sequence: Synthetic primer
accaagtagctgccagtttcttcaggtgtgcctttatttg

SEQ ID NO: 32600 - DNA, 40 bp, Artificial Sequence
  Description of Artificial Sequence: Synthetic primer
agatgtacagtcccaccggcccgactctccagctctcttc

SEQ ID NO: 32601 - DNA, 40 bp, Artificial Sequence
  Description of Artificial Sequence: Synthetic primer
catcagaatcctgaaggccatacttagaaaaatgggagac

SEQ ID NO: 32602 - DNA, 40 bp, Artificial Sequence
  Description of Artificial Sequence: Synthetic primer
caacagtttcttattctccgattcattttgtttttgttcc

SEQ ID NO: 32603 - DNA, 40 bp, Artificial Sequence
  Description of Artificial Sequence: Synthetic primer
aaaaaagctaacccaggtcccctcattccttcaacttgtg

SEQ ID NO: 32604 - DNA, 40 bp, Artificial Sequence
  Description of Artificial Sequence: Synthetic primer
tctgacgacgacaggcagaggacaggtccagtctctgtgg

SEQ ID NO: 32605 - DNA, 40 bp, Artificial Sequence
  Description of Artificial Sequence: Synthetic primer
agtggcggcgaccccctgacaggtcttggtggagtgatgg

SEQ ID NO: 32606 - DNA, 40 bp, Artificial Sequence
  Description of Artificial Sequence: Synthetic primer
atccagccagcctttggcaaagaatggtgtaactttcctc

SEQ ID NO: 32607 - DNA, 40 bp, Artificial Sequence
  Description of Artificial Sequence: Synthetic primer
gcttcttggctgttatggacccgcatggagtttaattatg

SEQ ID NO: 32608 - DNA, 40 bp, Artificial Sequence
  Description of Artificial Sequence: Synthetic primer
tctgtcttcggaacttcctgtggtcatctccctgacaacc

SEQ ID NO: 32609 - DNA, 40 bp, Artificial Sequence
  Description of Artificial Sequence: Synthetic primer
ggctcactcagcaactctgcggcttcctggtcctccttag

SEQ ID NO: 32610 - DNA, 40 bp, Artificial Sequence
  Description of Artificial Sequence: Synthetic primer
acaggcattgctagttcaaaaaccaaaactctgggaatac

SEQ ID NO: 32611 - DNA, 40 bp, Artificial Sequence
  Description of Artificial Sequence: Synthetic primer
cgaagaccaatttcagcagacagcgccatcatgaatccag

SEQ ID NO: 32612 - DNA, 40 bp, Artificial Sequence
  Description of Artificial Sequence: Synthetic primer
cgcttctgtgtatctctttcacattgtttgctgctattgg

SEQ ID NO: 32613 - DNA, 40 bp, Artificial Sequence
  Description of Artificial Sequence: Synthetic primer
tcacgacggagatctgggctttgagaagggggaacagctc

SEQ ID NO: 32614 - DNA, 40 bp, Artificial Sequence
  Description of Artificial Sequence: Synthetic primer
ttcttagaactggggttcttagaagtggtgatgcaagaag

SEQ ID NO: 32615 - DNA, 40 bp, Artificial Sequence
  Description of Artificial Sequence: Synthetic primer
cagcatcgagccttctcctgctttctctttaaagggtgct

SEQ ID NO: 32616 - DNA, 40 bp, Artificial Sequence
  Description of Artificial Sequence: Synthetic primer
atacaaacttggattttttccagtctgatccttttgttgg

SEQ ID NO: 32617 - DNA, 40 bp, Artificial Sequence
  Description of Artificial Sequence: Synthetic primer
tcggttgggacagtccgcccccacacagggatcttcaacc

SEQ ID NO: 32618 - DNA, 40 bp, Artificial Sequence
  Description of Artificial Sequence: Synthetic primer
gcaataaacttctcttggcatcagtgaacttttcaacagc

SEQ ID NO: 32619 - DNA, 40 bp, Artificial Sequence
  Description of Artificial Sequence: Synthetic primer
aagaagataggatatttgaagtgccatattttcttctcag

SEQ ID NO: 32620 - DNA, 40 bp, Artificial Sequence
  Description of Artificial Sequence: Synthetic primer
ttatatcaatttagaagttgatgtccagaacaggttatct

SEQ ID NO: 32621 - DNA, 40 bp, Artificial Sequence
  Description of Artificial Sequence: Synthetic primer
tccttgaaattacaggctcatatcttccccagtatttaag

SEQ ID NO: 32622 - DNA, 40 bp, Artificial Sequence
  Description of Artificial Sequence: Synthetic primer
ctggttgtcaatttactgatggctttcttggctgcatctc

SEQ ID NO: 32623 - DNA, 40 bp, Artificial Sequence
  Description of Artificial Sequence: Synthetic primer
gtcagcaaaggaagaaattgctcaaagatgccatgaactg

SEQ ID NO: 32624 - DNA, 40 bp, Artificial Sequence
  Description of Artificial Sequence: Synthetic primer
ctagaattttccttctaatgaaatacgtagtcattttccc

SEQ ID NO: 32625 - DNA, 40 bp, Artificial Sequence
  Description of Artificial Sequence: Synthetic primer
actactgatctgtttttgatgagtttctctatggctctgg

SEQ ID NO: 32626 - DNA, 40 bp, Artificial Sequence
  Description of Artificial Sequence: Synthetic primer
gctggagcatctggagcttttctggtcccgtgtcaacatc

SEQ ID NO: 32627 - DNA, 40 bp, Artificial Sequence
  Description of Artificial Sequence: Synthetic primer
agcttcgttgtgtacaagctcaagaagggcagctcacaac

SEQ ID NO: 32628 - DNA, 40 bp, Artificial Sequence
  Description of Artificial Sequence: Synthetic primer
aggaaacgtgctcttctaaatgaggagggagaagataaag

SEQ ID NO: 32629 - DNA, 40 bp, Artificial Sequence
  Description of Artificial Sequence: Synthetic primer
ttgttgaattctcggactaccagccatttgctacgctacc

SEQ ID NO: 32630 - DNA, 40 bp, Artificial Sequence
  Description of Artificial Sequence: Synthetic primer
ccaaaactggatctggcaagactctggcttttcttgttcc

SEQ ID NO: 32631 - DNA, 40 bp, Artificial Sequence
  Description of Artificial Sequence: Synthetic primer
gttcagatacacccggactcggatcaaatctcagggcttc

SEQ ID NO: 32632 - DNA, 40 bp, Artificial Sequence
  Description of Artificial Sequence: Synthetic primer
ccagctgcagaatgccaacaaggtcattcaaaacctcaag

SEQ ID NO: 32633 - DNA, 40 bp, Artificial Sequence
  Description of Artificial Sequence: Synthetic primer
ggctaattaatacggcctctccctgcgatcctgtctgtgc

SEQ ID NO: 32634 - DNA, 40 bp, Artificial Sequence
  Description of Artificial Sequence: Synthetic primer
gcaggaagtaaagaatgctggaaagttgaatcagaaattg

SEQ ID NO: 32635 - DNA, 40 bp, Artificial Sequence
  Description of Artificial Sequence: Synthetic primer
agcttcacctatcaagttgcccgaggaatggagtttttgg

SEQ ID NO: 32636 - DNA, 40 bp, Artificial Sequence
  Description of Artificial Sequence: Synthetic primer
aaacagtagttttcaggagcaaacttcagaaacaatacaa

SEQ ID NO: 32637 - DNA, 40 bp, Artificial Sequence
  Description of Artificial Sequence: Synthetic primer
caaaaacacaaaagtctacttcactagccagaaatgaaag

SEQ ID NO: 32638 - DNA, 40 bp, Artificial Sequence
  Description of Artificial Sequence: Synthetic primer
cccctcctactccggcagctcccggcggagagcggcagac

SEQ ID NO: 32639 - DNA, 40 bp, Artificial Sequence
  Description of Artificial Sequence: Synthetic primer
ctgagtgcggtaaggagctgccagggtggcagaaggttgg

SEQ ID NO: 32640 - DNA, 40 bp, Artificial Sequence
  Description of Artificial Sequence: Synthetic primer
aagtgttcctagctgaatgctataacctctgtcctgagca

SEQ ID NO: 32641 - DNA, 40 bp, Artificial Sequence
  Description of Artificial Sequence: Synthetic primer
acatgcatctcagcgtttttttgtttttaattgtatttag

SEQ ID NO: 32642 - DNA, 40 bp, Artificial Sequence
  Description of Artificial Sequence: Synthetic primer
acgaagatgaccacctgctctcacccacgaaaggcatctg

SEQ ID NO: 32643 - DNA, 40 bp, Artificial Sequence
  Description of Artificial Sequence: Synthetic primer
cttctttgactatgcgtcgtatgcgagagtctgtttccag

SEQ ID NO: 32644 - DNA, 40 bp, Artificial Sequence
  Description of Artificial Sequence: Synthetic primer
cttgtgggagttgtagtttcctgtttccggcttcgcttcg

SEQ ID NO: 32645 - DNA, 40 bp, Artificial Sequence
  Description of Artificial Sequence: Synthetic primer
cctgaccaagtagaagggatccagaaatctgggactaaaa

SEQ ID NO: 32646 - DNA, 40 bp, Artificial Sequence
  Description of Artificial Sequence: Synthetic primer
agaggtttggcaacttcacataatcatagcaaaaggactg

SEQ ID NO: 32647 - DNA, 40 bp, Artificial Sequence
  Description of Artificial Sequence: Synthetic primer
tgcgggttgcccagcacgtggccggtctgcgttctgtctg

SEQ ID NO: 32648 - DNA, 40 bp, Artificial Sequence
  Description of Artificial Sequence: Synthetic primer
tttgtcactgctccacacaaaccaacctctggaattattg

SEQ ID NO: 32649 - DNA, 40 bp, Artificial Sequence
  Description of Artificial Sequence: Synthetic primer
tcctctcgggttgcagcagaaacagctgctgggggcagtg

SEQ ID NO: 32650 - DNA, 40 bp, Artificial Sequence
  Description of Artificial Sequence: Synthetic primer
gttgactgtctcctcacgaactgattccatagggtccaac

SEQ ID NO: 32651 - DNA, 40 bp, Artificial Sequence
  Description of Artificial Sequence: Synthetic primer
ctgtcttcaggctgatgttgccagcactgagtcattatcc

SEQ ID NO: 32652 - DNA, 40 bp, Artificial Sequence
  Description of Artificial Sequence: Synthetic primer
ccaaatccagatggtgaaacacactgtcatagtctgaatg

SEQ ID NO: 32653 - DNA, 40 bp, Artificial Sequence
  Description of Artificial Sequence: Synthetic primer
ggacgtcctgtgaggggtggtgggtggcgggacgtctgtc

SEQ ID NO: 32654 - DNA, 40 bp, Artificial Sequence
  Description of Artificial Sequence: Synthetic primer
gtgattatatggtatatgaaacatgagattttgtaacctg

SEQ ID NO: 32655 - DNA, 40 bp, Artificial Sequence
  Description of Artificial Sequence: Synthetic primer
aggggctgggggtccactgaagtcccagacagctgggagg

SEQ ID NO: 32656 - DNA, 40 bp, Artificial Sequence
  Description of Artificial Sequence: Synthetic primer
gtccaggagaaagacgaacctcccagtggaatcttgtcag

SEQ ID NO: 32657 - DNA, 40 bp, Artificial Sequence
  Description of Artificial Sequence: Synthetic primer
ctgggtctggttcaggctcccatgaagggggcagcacctc

SEQ ID NO: 32658 - DNA, 40 bp, Artificial Sequence
  Description of Artificial Sequence: Synthetic primer
atcgggatacattataagcttgcattatttcaggaatcag

SEQ ID NO: 32659 - DNA, 40 bp, Artificial Sequence
  Description of Artificial Sequence: Synthetic primer
taaatattccaatcccagaaatgaccatcagctaaacaag

SEQ ID NO: 32660 - DNA, 40 bp, Artificial Sequence
  Description of Artificial Sequence: Synthetic primer
cagtagactttttctgcaccccaggggtgatgatggcaac

SEQ ID NO: 32661 - DNA, 40 bp, Artificial Sequence
  Description of Artificial Sequence: Synthetic primer
tacaagcatttttaacatggaaacacaacaacgcattctc

SEQ ID NO: 32662 - DNA, 40 bp, Artificial Sequence
  Description of Artificial Sequence: Synthetic primer
gggctccagggtcccagctccaggctggagccagtgaagg

SEQ ID NO: 32663 - DNA, 40 bp, Artificial Sequence
  Description of Artificial Sequence: Synthetic primer
tagaaaagactttgaaatacttcagtgcaaagtgtgtgtg

SEQ ID NO: 32664 - DNA, 40 bp, Artificial Sequence
  Description of Artificial Sequence: Synthetic primer
aaaattctacagaccatgctgcgacagagtgcctttctgc

SEQ ID NO: 32665 - DNA, 40 bp, Artificial Sequence
  Description of Artificial Sequence: Synthetic primer
tggtgacattccataggtagcaatttcccacaacaatacc

SEQ ID NO: 32666 - DNA, 40 bp, Artificial Sequence
  Description of Artificial Sequence: Synthetic primer
cttcaaaattaaaagaggagcagcatggcatttcagtcac

SEQ ID NO: 32667 - DNA, 40 bp, Artificial Sequence
  Description of Artificial Sequence: Synthetic primer
ggatcccttcctgcccactgatccccacaccaatgtgagc

SEQ ID NO: 32668 - DNA, 40 bp, Artificial Sequence
  Description of Artificial Sequence: Synthetic primer
acagccaacagccttgctggcctcaatgcagcacccttgc

SEQ ID NO: 32669 - DNA, 40 bp, Artificial Sequence
  Description of Artificial Sequence: Synthetic primer
taaattgttacaaacaataatgcgtcattaaaggccatgc

SEQ ID NO: 32670 - DNA, 40 bp, Artificial Sequence
  Description of Artificial Sequence: Synthetic primer
ctgggacattgtcactgaggcagacagcagccactagtcc

SEQ ID NO: 32671 - DNA, 40 bp, Artificial Sequence
  Description of Artificial Sequence: Synthetic primer
cctgttgatgggtcttctgctggagcaggtatagaggttg

SEQ ID NO: 32672 - DNA, 40 bp, Artificial Sequence
  Description of Artificial Sequence: Synthetic primer
ggtccgtaggtggctgagcagctcctccgaggtggcgaag

SEQ ID NO: 32673 - DNA, 40 bp, Artificial Sequence
  Description of Artificial Sequence: Synthetic primer
agaacttgcttgttttctcagaatagataaaagtttctac

SEQ ID NO: 32674 - DNA, 40 bp, Artificial Sequence
  Description of Artificial Sequence: Synthetic primer
atacctgctggagttgaagcagtaaatagcatgtccttcc

SEQ ID NO: 32675 - DNA, 40 bp, Artificial Sequence
  Description of Artificial Sequence: Synthetic primer
tctgacttggggccatttactggtttgttgtcaaaatctg

SEQ ID NO: 32676 - DNA, 40 bp, Artificial Sequence
  Description of Artificial Sequence: Synthetic primer
ctgggaagggaagagaaaaaagacgcaggccacctggggg

SEQ ID NO: 32677 - DNA, 40 bp, Artificial Sequence
  Description of Artificial Sequence: Synthetic primer
tatcaatgtggattgtgcaaaattaaaacgactcctgaag

SEQ ID NO: 32678 - DNA, 40 bp, Artificial Sequence
  Description of Artificial Sequence: Synthetic primer
gaaattgaccctgtcatgcagtcccttggatattgctgtg

SEQ ID NO: 32679 - DNA, 40 bp, Artificial Sequence
  Description of Artificial Sequence: Synthetic primer
tggctccacctctctatggttaactgcaatataagcagcg

SEQ ID NO: 32680 - DNA, 40 bp, Artificial Sequence
  Description of Artificial Sequence: Synthetic primer
ggtggctattttgtacagatcccacaatgcaagcctccac

SEQ ID NO: 32681 - DNA, 40 bp, Artificial Sequence
  Description of Artificial Sequence: Synthetic primer
aaaggtgcctggggagggacggcaacactgggtcctgctg

SEQ ID NO: 32682 - DNA, 40 bp, Artificial Sequence
  Description of Artificial Sequence: Synthetic primer
gatcattctctgggtatttcctatcctcagcatcttccag

SEQ ID NO: 32683 - DNA, 40 bp, Artificial Sequence
  Description of Artificial Sequence: Synthetic primer
cactgttgttggatctactggatcaggcatactgctaaag

SEQ ID NO: 32684 - DNA, 40 bp, Artificial Sequence
  Description of Artificial Sequence: Synthetic primer
gcgaaatgcctttagcaaggtaaacctgtagaagcaactg

SEQ ID NO: 32685 - DNA, 40 bp, Artificial Sequence
  Description of Artificial Sequence: Synthetic primer
gaggccgcatgctggggccgtacagttccacaaaggcatc

SEQ ID NO: 32686 - DNA, 40 bp, Artificial Sequence
  Description of Artificial Sequence: Synthetic primer
taagctgttcctgttcagtaataaaaccggtcactgatgg

SEQ ID NO: 32687 - DNA, 40 bp, Artificial Sequence
  Description of Artificial Sequence: Synthetic primer
agtgggacatttgcatggactgggggcttaaaggacttag

SEQ ID NO: 32688 - DNA, 40 bp, Artificial Sequence
  Description of Artificial Sequence: Synthetic primer
aggcatcatggcagatccaaccgtcaatgtccctctgctg

SEQ ID NO: 32689 - DNA, 40 bp, Artificial Sequence
  Description of Artificial Sequence: Synthetic primer
gcaaagtaccgtatgcgaaacgtgcacccgaaacctaagc

SEQ ID NO: 32690 - DNA, 40 bp, Artificial Sequence
  Description of Artificial Sequence: Synthetic primer
ctgtattatagttagttgtttgaatattttccttcagttc

SEQ ID NO: 32691 - DNA, 40 bp, Artificial Sequence
  Description of Artificial Sequence: Synthetic primer
ccagaactgatgggatgcacttcatgtagagcctgtcgaa

SEQ ID NO: 32692 - DNA, 40 bp, Artificial Sequence
  Description of Artificial Sequence: Synthetic primer
ataattttttgagaacttctttagcctccaactcaacagc

SEQ ID NO: 32693 - DNA, 40 bp, Artificial Sequence
  Description of Artificial Sequence: Synthetic primer
gtccctctagctgggggtcactgcgagccgcctcgctcgg

SEQ ID NO: 32694 - DNA, 40 bp, Artificial Sequence
  Description of Artificial Sequence: Synthetic primer
ttcagaggcagcggctccgctctaggccccagggccttac

SEQ ID NO: 32695 - DNA, 40 bp, Artificial Sequence
  Description of Artificial Sequence: Synthetic primer
ggaggcggctgggtccccgttacggcgcggccatggagcg

SEQ ID NO: 32696 - DNA, 40 bp, Artificial Sequence
  Description of Artificial Sequence: Synthetic primer
ccaaccagcagaaggagagcatggaacagttcattgtcag

SEQ ID NO: 32697 - DNA, 40 bp, Artificial Sequence
  Description of Artificial Sequence: Synthetic primer
caatctcctctccaaggagtctgcaatggtgcactaccag

SEQ ID NO: 32698 - DNA, 40 bp, Artificial Sequence
  Description of Artificial Sequence: Synthetic primer
cggcagagtccccatcgccatcccaggaaccaagaagtgg

SEQ ID NO: 32699 - DNA, 40 bp, Artificial Sequence
  Description of Artificial Sequence: Synthetic primer
tttgtttttatttaaattacaattttatctgtttcctgac

SEQ ID NO: 32700 - DNA, 40 bp, Artificial Sequence
  Description of Artificial Sequence: Synthetic primer
agcaaatccactcctctaagactccagcggctggaattgg

SEQ ID NO: 32701 - DNA, 40 bp, Artificial Sequence
  Description of Artificial Sequence: Synthetic primer
atcgaccatgagtctggtcaaacagctgtcgggtcagctg

SEQ ID NO: 32702 - DNA, 40 bp, Artificial Sequence
  Description of Artificial Sequence: Synthetic primer
aagtttgagttgtatttgtgcatcttaaagtaggttgagg

SEQ ID NO: 32703 - DNA, 40 bp, Artificial Sequence
  Description of Artificial Sequence: Synthetic primer
catgttgcgcagcttcacgaagtcgcaatgcgcctggttc

SEQ ID NO: 32704 - DNA, 40 bp, Artificial Sequence
  Description of Artificial Sequence: Synthetic primer
gaacttcatcgactttgggctggacctacagccctgcatc

SEQ ID NO: 32705 - DNA, 40 bp, Artificial Sequence
  Description of Artificial Sequence: Synthetic primer
agatcatttagaattcctaagcagtcgattgtcatagacc

SEQ ID NO: 32706 - DNA, 40 bp, Artificial Sequence
  Description of Artificial Sequence: Synthetic primer
gaaaggggaaaaatgaagagaaacaagtatatctgaaatg

SEQ ID NO: 32707 - DNA, 40 bp, Artificial Sequence
  Description of Artificial Sequence: Synthetic primer
cagccgccgtgcgcccggcacacatgtgccgcagcccgtg

SEQ ID NO: 32708 - DNA, 40 bp, Artificial Sequence
  Description of Artificial Sequence: Synthetic primer
ggcccccgtgagcctgaatgtgccccgacccaaccaggtg

SEQ ID NO: 32709 - DNA, 40 bp, Artificial Sequence
  Description of Artificial Sequence: Synthetic primer
agcctgtcttgccccctgacacttatttctgttttgttac

SEQ ID NO: 32710 - DNA, 40 bp, Artificial Sequence
  Description of Artificial Sequence: Synthetic primer
atttcttcatgttagaatttgagtgcggataggtcttcag

SEQ ID NO: 32711 - DNA, 40 bp, Artificial Sequence
  Description of Artificial Sequence: Synthetic primer
agggatacaagagcaaactcttcagccatttccacaccac

SEQ ID NO: 32712 - DNA, 40 bp, Artificial Sequence
  Description of Artificial Sequence: Synthetic primer
cccagggcagcaaggttacccaggacagcagcagggctac

SEQ ID NO: 32713 - DNA, 40 bp, Artificial Sequence
  Description of Artificial Sequence: Synthetic primer
tgctgcagctcacagactatgtagttctgttccaaagtgg

SEQ ID NO: 32714 - DNA, 40 bp, Artificial Sequence
  Description of Artificial Sequence: Synthetic primer
agcatgtggctgaagatgagggacagtttggttaggtttc

SEQ ID NO: 32715 - DNA, 40 bp, Artificial Sequence
  Description of Artificial Sequence: Synthetic primer
aaaggaaatgaatggttccactcaaatgtcctgcaattta

SEQ ID NO: 32716 - DNA, 40 bp, Artificial Sequence
  Description of Artificial Sequence: Synthetic primer
ttcaggcagtcagggtggaaggccgctgggcaggactcac

SEQ ID NO: 32717 - DNA, 40 bp, Artificial Sequence
  Description of Artificial Sequence: Synthetic primer
gatgactggacagttaccttattcaaacatcaacaacagg

SEQ ID NO: 32718 - DNA, 40 bp, Artificial Sequence
  Description of Artificial Sequence: Synthetic primer
gcactttgtggagaaagtcgtcttccacttgcacgaaagc

SEQ ID NO: 32719 - DNA, 40 bp, Artificial Sequence
  Description of Artificial Sequence: Synthetic primer
ggtaaactctgttcgatattcatcacggcgcgcttcacag

SEQ ID NO: 32720 - DNA, 40 bp, Artificial Sequence
  Description of Artificial Sequence: Synthetic primer
cccgggacgccctcaaggtgggcggccccagtgccgagtg

SEQ ID NO: 32721 - DNA, 40 bp, Artificial Sequence
  Description of Artificial Sequence: Synthetic primer
gcccacgcagacctgcagcgggcaaagagctcccgaggaa

SEQ ID NO: 32722 - DNA, 40 bp, Artificial Sequence
  Description of Artificial Sequence: Synthetic primer
gcagaaggactggcctggctactcggagggggaccagcag

SEQ ID NO: 32723 - DNA, 40 bp, Artificial Sequence
  Description of Artificial Sequence: Synthetic primer
actaaatttcccattgttaacgcagaactttcattctttg

SEQ ID NO: 32724 - DNA, 40 bp, Artificial Sequence
  Description of Artificial Sequence: Synthetic primer
tccagagaatcgcattcgttcctttcactgaattggtcac

SEQ ID NO: 32725 - DNA, 40 bp, Artificial Sequence
  Description of Artificial Sequence: Synthetic primer
cacattttggaagccccagcatcgtgtacttaccagtgtg

SEQ ID NO: 32726 - DNA, 40 bp, Artificial Sequence
  Description of Artificial Sequence: Synthetic primer
taaacttcctcagagagggaaatccgcgcgcagtgggaag

SEQ ID NO: 32727 - DNA, 40 bp, Artificial Sequence
  Description of Artificial Sequence: Synthetic primer
tatttctattaaattagaaaattgaaaaagttttcaaatg

SEQ ID NO: 32728 - DNA, 40 bp, Artificial Sequence
  Description of Artificial Sequence: Synthetic primer
cgtccacactggccggcaccccctgctgggtctcctgcat

SEQ ID NO: 32729 - DNA, 40 bp, Artificial Sequence
  Description of Artificial Sequence: Synthetic primer
tattttttctttctttcatagctgtgtctcagaaaggacc

SEQ ID NO: 32730 - DNA, 40 bp, Artificial Sequence
  Description of Artificial Sequence: Synthetic primer
actctatgcacatttcctacacaaaatctttcccaagctc

SEQ ID NO: 32731 - DNA, 40 bp, Artificial Sequence
  Description of Artificial Sequence: Synthetic primer
caacagctattctcccagggcaacacattccctcctaccc

SEQ ID NO: 32732 - DNA, 40 bp, Artificial Sequence
  Description of Artificial Sequence: Synthetic primer
atcaacttcgacgtcacgggttacatcgtgggagccaaca

SEQ ID NO: 32733 - DNA, 40 bp, Artificial Sequence
  Description of Artificial Sequence: Synthetic primer
ttggatattttaaaatgtcttatacataagcttaaagtaa

SEQ ID NO: 32734 - DNA, 40 bp, Artificial Sequence
  Description of Artificial Sequence: Synthetic primer
ccataatcttctctatgtcctggagctcgttgcacctttc

SEQ ID NO: 32735 - DNA, 40 bp, Artificial Sequence
  Description of Artificial Sequence: Synthetic primer
ggaagcctggagaacgggacaggaccagaggaccacgttc

SEQ ID NO: 32736 - DNA, 40 bp, Artificial Sequence
  Description of Artificial Sequence: Synthetic primer
ctgccttcaaattttagcttatggcaaccaagaaagcaag

SEQ ID NO: 32737 - DNA, 40 bp, Artificial Sequence
  Description of Artificial Sequence: Synthetic primer
aattctcatcacacacacactctgcaaagcttgtgcaggg

SEQ ID NO: 32738 - DNA, 40 bp, Artificial Sequence
  Description of Artificial Sequence: Synthetic primer
caagcaatgctcggagctggggatctgcgccgtttctgtg

SEQ ID NO: 32739 - DNA, 40 bp, Artificial Sequence
  Description of Artificial Sequence: Synthetic primer
tgagccaaaaccaatctccactcagggcagaataaagcag

SEQ ID NO: 32740 - DNA, 40 bp, Artificial Sequence
  Description of Artificial Sequence: Synthetic primer
ggataagctgctgcaggcaaagaaagaaattgaaatgcac

SEQ ID NO: 32741 - DNA, 40 bp, Artificial Sequence
  Description of Artificial Sequence: Synthetic primer
gctgtcactgatatgcccaagggcagtcctggcagcacca

SEQ ID NO: 32742 - DNA, 40 bp, Artificial Sequence
  Description of Artificial Sequence: Synthetic primer
ccaaaggtgaatcttttggttggtgattttgatgatagcc

SEQ ID NO: 32743 - DNA, 40 bp, Artificial Sequence
  Description of Artificial Sequence: Synthetic primer
ggggactgggcttcgctgtcagcccggctcctctccaaag

SEQ ID NO: 32744 - DNA, 40 bp, Artificial Sequence
  Description of Artificial Sequence: Synthetic primer
gatgacctaaaaatcagtggtatttgtttgtcctcagaag

SEQ ID NO: 32745 - DNA, 40 bp, Artificial Sequence
  Description of Artificial Sequence: Synthetic primer
cagcctctccgcctgctgcagcatgcattctgccctctgg

SEQ ID NO: 32746 - DNA, 40 bp, Artificial Sequence
  Description of Artificial Sequence: Synthetic primer
aatccaagtagatttaattttttctagagcagccaattcc

SEQ ID NO: 32747 - DNA, 40 bp, Artificial Sequence
  Description of Artificial Sequence: Synthetic primer
ctcaggaacaaagtgcaattccgaggtgtccatgggtgac

SEQ ID NO: 32748 - DNA, 40 bp, Artificial Sequence
  Description of Artificial Sequence: Synthetic primer
tgtcaataaagccgtaggatcgcgcaaccctttgtgtgtg

SEQ ID NO: 32749 - DNA, 40 bp, Artificial Sequence
  Description of Artificial Sequence: Synthetic primer
gcagcagcttggccaaggcctctgggggtaggagtgaagg

SEQ ID NO: 32750 - DNA, 40 bp, Artificial Sequence
  Description of Artificial Sequence: Synthetic primer
atactacgggaaagggtccagcatgccctgggtttgagtg

SEQ ID NO: 32751 - DNA, 40 bp, Artificial Sequence
  Description of Artificial Sequence: Synthetic primer
tccaccatctggaagctgagatccgtgagcggaatgtacc

SEQ ID NO: 32752 - DNA, 40 bp, Artificial Sequence
  Description of Artificial Sequence: Synthetic primer
gcagcagcgtcaggaaggtgccattgcggagcctcatctc

SEQ ID NO: 32753 - DNA, 40 bp, Artificial Sequence
  Description of Artificial Sequence: Synthetic primer
tcctgcagagggccccggaacagcacccccgagccaccag

SEQ ID NO: 32754 - DNA, 40 bp, Artificial Sequence
  Description of Artificial Sequence: Synthetic primer
tttaggggggtgtgtgtgcacgtgcgtttctctccattag

SEQ ID NO: 32755 - DNA, 40 bp, Artificial Sequence
  Description of Artificial Sequence: Synthetic primer
cagaattaaagatcgagacgaagaaattcaaaaactcagg

SEQ ID NO: 32756 - DNA, 40 bp, Artificial Sequence
  Description of Artificial Sequence: Synthetic primer
ctgcagtcaaggttgtcaatttgttggagatgcagccttc

SEQ ID NO: 32757 - DNA, 40 bp, Artificial Sequence
  Description of Artificial Sequence: Synthetic primer
aacaccccgagagctgctaccattgttgctacctcagaag

SEQ ID NO: 32758 - DNA, 40 bp, Artificial Sequence
  Description of Artificial Sequence: Synthetic primer
gttttggacacacggtcagggtcagggccatttcagcttg

SEQ ID NO: 32759 - DNA, 40 bp, Artificial Sequence
  Description of Artificial Sequence: Synthetic primer
ctgggtaaaaattcttaggacagcacctggagttgagagg

SEQ ID NO: 32760 - DNA, 40 bp, Artificial Sequence
  Description of Artificial Sequence: Synthetic primer
agtaagaaatttatagccacctaaagaaaagcagtagttg

SEQ ID NO: 32761 - DNA, 40 bp, Artificial Sequence
  Description of Artificial Sequence: Synthetic primer
tctcatttaaatatctactataccgcctaataaatgtaga

SEQ ID NO: 32762 - DNA, 40 bp, Artificial Sequence
  Description of Artificial Sequence: Synthetic primer
agaggtgtcgcctctgctctgtctgaggagatgctccaag

SEQ ID NO: 32763 - DNA, 40 bp, Artificial Sequence
  Description of Artificial Sequence: Synthetic primer
attctttgtccagtaaattagctcttcataacgcagttcc

SEQ ID NO: 32764 - DNA, 40 bp, Artificial Sequence
  Description of Artificial Sequence: Synthetic primer
taggtagatcataatttataaccaaagacacttgttgcac

SEQ ID NO: 32765 - DNA, 40 bp, Artificial Sequence
  Description of Artificial Sequence: Synthetic primer
aacagtagtagacttgttaagaatgaaactgtaaccaaaa

SEQ ID NO: 32766 - DNA, 40 bp, Artificial Sequence
  Description of Artificial Sequence: Synthetic primer
ggtgcagctgcaccacggaggcaacaaggggcagcgctgg

SEQ ID NO: 32767 - DNA, 40 bp, Artificial Sequence
  Description of Artificial Sequence: Synthetic primer
ggagatacatgatatgcaacattaaatattggtgtcctag

SEQ ID NO: 32768 - DNA, 40 bp, Artificial Sequence
  Description of Artificial Sequence: Synthetic primer
tcccagggcagctcccaggcacaggaaacccacccactgc

SEQ ID NO: 32769 - DNA, 40 bp, Artificial Sequence
  Description of Artificial Sequence: Synthetic primer
cccgcgtacagtaggcatgtatagtggagtgtagggaaac

SEQ ID NO: 32770 - DNA, 40 bp, Artificial Sequence
  Description of Artificial Sequence: Synthetic primer
tgaacatgcagcaaagtacatgaagaacagtcaagtaagg

SEQ ID NO: 32771 - DNA, 40 bp, Artificial Sequence
  Description of Artificial Sequence: Synthetic primer
gcttttagaatgctctttctcatgaagcaaggaaataaat

SEQ ID NO: 32772 - DNA, 40 bp, Artificial Sequence
  Description of Artificial Sequence: Synthetic primer
tctggttggagagatctgttcagtcgctcggagccaccag

SEQ ID NO: 32773 - DNA, 40 bp, Artificial Sequence
  Description of Artificial Sequence: Synthetic primer
acttaggaaaaatgtctcctaactaaactagtgctttctg

SEQ ID NO: 32774 - DNA, 40 bp, Artificial Sequence
  Description of Artificial Sequence: Synthetic primer
ctaaaataacaggtcacactaaccggtcttgtccatattc

SEQ ID NO: 32775 - DNA, 40 bp, Artificial Sequence
  Description of Artificial Sequence: Synthetic primer
tgatatccaggagctgtcagagcagatccaccggctgctg

SEQ ID NO: 32776 - DNA, 40 bp, Artificial Sequence
  Description of Artificial Sequence: Synthetic primer
tagcacccttttcatcagaatgctgggctccaggaggaag

SEQ ID NO: 32777 - DNA, 40 bp, Artificial Sequence
  Description of Artificial Sequence: Synthetic primer
ggtgaagaagccgaaaatggagcacgtccaggctgaccac

SEQ ID NO: 32778 - DNA, 40 bp, Artificial Sequence
  Description of Artificial Sequence: Synthetic primer
gaatgtataggtgacaaagggggaactggggaaggcaaag

SEQ ID NO: 32779 - DNA, 40 bp, Artificial Sequence
  Description of Artificial Sequence: Synthetic primer
catatggtaaatattccataattaattttagattacgccg

SEQ ID NO: 32780 - DNA, 40 bp, Artificial Sequence
  Description of Artificial Sequence: Synthetic primer
cctccaactaaaggggcggccagcccgattcctggacagc

SEQ ID NO: 32781 - DNA, 40 bp, Artificial Sequence
  Description of Artificial Sequence: Synthetic primer
gatcctcaaccagcagcagcagcagcaccacaactaccag

SEQ ID NO: 32782 - DNA, 40 bp, Artificial Sequence
  Description of Artificial Sequence: Synthetic primer
agttggcctctccttgaggtgggcacagcctggcagtgtg

SEQ ID NO: 32783 - DNA, 40 bp, Artificial Sequence
  Description of Artificial Sequence: Synthetic primer
ctttaggacagaaagaattataagaaaaccagcataatac

SEQ ID NO: 32784 - DNA, 40 bp, Artificial Sequence
  Description of Artificial Sequence: Synthetic primer
cgcagcccctctgcgtcctcggctcgggggccggcaccgg

SEQ ID NO: 32785 - DNA, 40 bp, Artificial Sequence
  Description of Artificial Sequence: Synthetic primer
ttggtctcaaatgaaaagagtcctgcagttctcgggaacc

SEQ ID NO: 32786 - DNA, 40 bp, Artificial Sequence
  Description of Artificial Sequence: Synthetic primer
atattaaccaaaaggttatctaattttgcccatattggtg

SEQ ID NO: 32787 - DNA, 40 bp, Artificial Sequence
  Description of Artificial Sequence: Synthetic primer
ggcttcttgtcatcattagcctcttctcccatctcttctg

SEQ ID NO: 32788 - DNA, 40 bp, Artificial Sequence
  Description of Artificial Sequence: Synthetic primer
ctgggttgcaggtgccacatctgtgcagaaggcttaggag

SEQ ID NO: 32789 - DNA, 40 bp, Artificial Sequence
  Description of Artificial Sequence: Synthetic primer
cactccttgcttgagtgggttaaaggaactaacagttgtc

SEQ ID NO: 32790 - DNA, 40 bp, Artificial Sequence
  Description of Artificial Sequence: Synthetic primer
cttacagtgggatttcaagacaagatcggcctgaagaaaa

SEQ ID NO: 32791 - DNA, 40 bp, Artificial Sequence
  Description of Artificial Sequence: Synthetic primer
cgcatcatggtgttcttcccgcctttcccgccagcagctc

SEQ ID NO: 32792 - DNA, 40 bp, Artificial Sequence
  Description of Artificial Sequence: Synthetic primer
ttgagatcaactaatttggagaagtgtgtgtgtgcgtatc

SEQ ID NO: 32793 - DNA, 40 bp, Artificial Sequence
  Description of Artificial Sequence: Synthetic primer
gatgttccagctaattgacattgcccggcagacggctcag

SEQ ID NO: 32794 - DNA, 40 bp, Artificial Sequence
  Description of Artificial Sequence: Synthetic primer
tgaccatagtctggctggtcataggaaggtgctcttccac

SEQ ID NO: 32795 - DNA, 40 bp, Artificial Sequence
  Description of Artificial Sequence: Synthetic primer
gaagagcatttaagaaatattcagtctgaagttttaaaac

SEQ ID NO: 32796 - DNA, 40 bp, Artificial Sequence
  Description of Artificial Sequence: Synthetic primer
agaaacctcagagtgactaaaatctccataatgagaagac

SEQ ID NO: 32797 - DNA, 40 bp, Artificial Sequence
  Description of Artificial Sequence: Synthetic primer
cccaagcccctctttctaaaaaagtgatggaatattcatg

SEQ ID NO: 32798 - DNA, 40 bp, Artificial Sequence
  Description of Artificial Sequence: Synthetic primer
gctccgctccccagggcctggccccgctgtgactctccgc

SEQ ID NO: 32799 - DNA, 40 bp, Artificial Sequence
  Description of Artificial Sequence: Synthetic primer
tttctagatcaattcaacatatttgatgacatttgttgag

SEQ ID NO: 32800 - DNA, 40 bp, Artificial Sequence
  Description of Artificial Sequence: Synthetic primer
gcggagacatctgccagtggatctccagacactttactac

SEQ ID NO: 32801 - DNA, 40 bp, Artificial Sequence
  Description of Artificial Sequence: Synthetic primer
tccatgattcagagtctgaattttcaatattcaaagcatc

SEQ ID NO: 32802 - DNA, 40 bp, Artificial Sequence
  Description of Artificial Sequence: Synthetic primer
tcgtaatagctcagattagaatggctaccccattctctag

SEQ ID NO: 32803 - DNA, 40 bp, Artificial Sequence
  Description of Artificial Sequence: Synthetic primer
tgtacgtggaccttctctcgaaaatcatttccttgtgagc

SEQ ID NO: 32804 - DNA, 40 bp, Artificial Sequence
  Description of Artificial Sequence: Synthetic primer
tggtgagacgggctacgtgccgccagcctacctgcgccgc

SEQ ID NO: 32805 - DNA, 40 bp, Artificial Sequence
  Description of Artificial Sequence: Synthetic primer
accagttggcaccaaaggattcctaaacttcaacttcttt

SEQ ID NO: 32806 - DNA, 40 bp, Artificial Sequence
  Description of Artificial Sequence: Synthetic primer
ctgcctctccactgtggacctttgggaaccgactcctcac

SEQ ID NO: 32807 - DNA, 40 bp, Artificial Sequence
  Description of Artificial Sequence: Synthetic primer
cagatctcccctccaccagccaggatcctccttctagctc

SEQ ID NO: 32808 - DNA, 40 bp, Artificial Sequence
  Description of Artificial Sequence: Synthetic primer
agaaagtgggagtaacatctgtaggaggttctttaactgg

SEQ ID NO: 32809 - DNA, 40 bp, Artificial Sequence
  Description of Artificial Sequence: Synthetic primer
acatcgctgtgtgtaagttttctctccaggcctcctcaag

SEQ ID NO: 32810 - DNA, 40 bp, Artificial Sequence
  Description of Artificial Sequence: Synthetic primer
gatgggggtgatgcagggactgaggggaaccctgggacag

SEQ ID NO: 32811 - DNA, 40 bp, Artificial Sequence
  Description of Artificial Sequence: Synthetic primer
atctacctcaaatctgtgctttagacccatgccataggag

SEQ ID NO: 32812 - DNA, 40 bp, Artificial Sequence
  Description of Artificial Sequence: Synthetic primer
tttgacataagatgctttgtatatttctcatttcttttag

SEQ ID NO: 32813 - DNA, 40 bp, Artificial Sequence
  Description of Artificial Sequence: Synthetic primer
catctcttaagatgatgcaggcagtaggaggtgcacctgc

SEQ ID NO: 32814 - DNA, 40 bp, Artificial Sequence
  Description of Artificial Sequence: Synthetic primer
cggagagcagcagccgcccgcttcaaccccaggggaccag

SEQ ID NO: 32815 - DNA, 40 bp, Artificial Sequence
  Description of Artificial Sequence: Synthetic primer
ggactgcagcactgcgcacttgttcatagtcatcagagag

SEQ ID NO: 32816 - DNA, 40 bp, Artificial Sequence
  Description of Artificial Sequence: Synthetic primer
tctgagaaataaaggacacgttatatgaaggaatagatgg

SEQ ID NO: 32817 - DNA, 40 bp, Artificial Sequence
  Description of Artificial Sequence: Synthetic primer
tgtggcccctaaaggagcaggagagagtggggaagaggat

SEQ ID NO: 32818 - DNA, 40 bp, Artificial Sequence
  Description of Artificial Sequence: Synthetic primer
agggcaacccgcagcacttgtcccagagggagctcatcac

SEQ ID NO: 32819 - DNA, 40 bp, Artificial Sequence
  Description of Artificial Sequence: Synthetic primer
ggggaaagagagattgatctggatggcaagaccgtttatc

SEQ ID NO: 32820 - DNA, 40 bp, Artificial Sequence
  Description of Artificial Sequence: Synthetic primer
atcaatggcctgccatatggtctgtgtgccggctgcgtga

SEQ ID NO: 32821 - DNA, 40 bp, Artificial Sequence
  Description of Artificial Sequence: Synthetic primer
ctaccttcaccaagtggttctcccctaccaggcagtttcg

SEQ ID NO: 32822 - DNA, 40 bp, Artificial Sequence
  Description of Artificial Sequence: Synthetic primer
tgaattgtttctgtaaatcagcaagacttttccctaagac

SEQ ID NO: 32823 - DNA, 40 bp, Artificial Sequence
  Description of Artificial Sequence: Synthetic primer
actggaaacaccaaagttggaagaggctgagatggttgag

SEQ ID NO: 32824 - DNA, 40 bp, Artificial Sequence
  Description of Artificial Sequence: Synthetic primer
tggaccagtggtctcacatggtgctacgcctgcatgtaaa

SEQ ID NO: 32825 - DNA, 40 bp, Artificial Sequence
  Description of Artificial Sequence: Synthetic primer
atggcggcgcctcaatccgggacttccgcctgcgcacgcg

SEQ ID NO: 32826 - DNA, 40 bp, Artificial Sequence
  Description of Artificial Sequence: Synthetic primer
aaagaattgcaacagctcgattggcacggttataagaaag

SEQ ID NO: 32827 - DNA, 40 bp, Artificial Sequence
  Description of Artificial Sequence: Synthetic primer
tctgcatatgtcttcatggactctcccattctcacaatcc

SEQ ID NO: 32828 - DNA, 40 bp, Artificial Sequence
  Description of Artificial Sequence: Synthetic primer
ccgcctgaagagcacgccatgcccattgggagaatagcag

SEQ ID NO: 32829 - DNA, 40 bp, Artificial Sequence
  Description of Artificial Sequence: Synthetic primer
ttattgcctgcctgttgaagctgccaataggtttctttag

SEQ ID NO: 32830 - DNA, 40 bp, Artificial Sequence
  Description of Artificial Sequence: Synthetic primer
gcagccggccggcagtccacgccgcacagcggtccaggcg

SEQ ID NO: 32831 - DNA, 40 bp, Artificial Sequence
  Description of Artificial Sequence: Synthetic primer
tgcgcaggtcaaaacctggttccagaaccggcggacaaag

SEQ ID NO: 32832 - DNA, 40 bp, Artificial Sequence
  Description of Artificial Sequence: Synthetic primer
tctcagagctttagcttttctagcactcgtgcctatggtg

SEQ ID NO: 32833 - DNA, 40 bp, Artificial Sequence
  Description of Artificial Sequence: Synthetic primer
agattgcgaatcaagcgagcccacgagaacagtgtaacta

SEQ ID NO: 32834 - DNA, 40 bp, Artificial Sequence
  Description of Artificial Sequence: Synthetic primer
gaacagtaaacacctgatgctccaggtccacactggtcac

SEQ ID NO: 32835 - DNA, 40 bp, Artificial Sequence
  Description of Artificial Sequence: Synthetic primer
gcaggttgagcatgcagctctcctttgcaaccgggtctga

SEQ ID NO: 32836 - DNA, 40 bp, Artificial Sequence
  Description of Artificial Sequence: Synthetic primer
ccaaaatgattttgtaagtgccactgcaatattccctttc

SEQ ID NO: 32837 - DNA, 40 bp, Artificial Sequence
  Description of Artificial Sequence: Synthetic primer
gttcctgcacatagtagtagcaaaggtatggtgttcatgg

SEQ ID NO: 32838 - DNA, 40 bp, Artificial Sequence
  Description of Artificial Sequence: Synthetic primer
tgagggtggatctccggaggtcatcgatgtggacagactg

SEQ ID NO: 32839 - DNA, 40 bp, Artificial Sequence
  Description of Artificial Sequence: Synthetic primer
ttacgcacaagagttccgtagctgttcaagtttgtgtttc

SEQ ID NO: 32840 - DNA, 40 bp, Artificial Sequence
  Description of Artificial Sequence: Synthetic primer
cttatgcaaatagttgaccaaatctccatagaagcaatac

SEQ ID NO: 32841 - DNA, 40 bp, Artificial Sequence
  Description of Artificial Sequence: Synthetic primer
ctagcacaagaggaatcagccaggaccaatgctgaaaaac

SEQ ID NO: 32842 - DNA, 40 bp, Artificial Sequence
  Description of Artificial Sequence: Synthetic primer
gcctcaatcacgccagcctgggcttcaacgagtactttcc

SEQ ID NO: 32843 - DNA, 40 bp, Artificial Sequence
  Description of Artificial Sequence: Synthetic primer
ctttctcaggtatcgacctgatattgttgctatgaaatcc

SEQ ID NO: 32844 - DNA, 40 bp, Artificial Sequence
  Description of Artificial Sequence: Synthetic primer
aatggaaactccagttgtgttgctggcagttttaggttag

SEQ ID NO: 32845 - DNA, 40 bp, Artificial Sequence
  Description of Artificial Sequence: Synthetic primer
tccaaactgaatcccagaacggaagaagttgagggtgaag

SEQ ID NO: 32846 - DNA, 40 bp, Artificial Sequence
  Description of Artificial Sequence: Synthetic primer
agaaattccacaatgaattaaatgcccacataaaactttc

SEQ ID NO: 32847 - DNA, 40 bp, Artificial Sequence
  Description of Artificial Sequence: Synthetic primer
ggtcctatgtagtaaaagcctgcttttgccagatctgttg

SEQ ID NO: 32848 - DNA, 40 bp, Artificial Sequence
  Description of Artificial Sequence: Synthetic primer
aacacctgcaacaacaggattcacggatcagcctgagatg

SEQ ID NO: 32849 - DNA, 40 bp, Artificial Sequence
  Description of Artificial Sequence: Synthetic primer
ttgaaaaccaaagagtgtttaacagaaagctgaatatgtg

SEQ ID NO: 32850 - DNA, 40 bp, Artificial Sequence
  Description of Artificial Sequence: Synthetic primer
gcaagcagcgacacagcacacgcagtgcgccctggctaga

SEQ ID NO: 32851 - DNA, 40 bp, Artificial Sequence
  Description of Artificial Sequence: Synthetic primer
ttttttcttttgagtttgttgtattcctatgcataaaaaa

SEQ ID NO: 32852 - DNA, 40 bp, Artificial Sequence
  Description of Artificial Sequence: Synthetic primer
ccgtgcctacgtcagggctgtcctccatgggtcccgagca

SEQ ID NO: 32853 - DNA, 40 bp, Artificial Sequence
  Description of Artificial Sequence: Synthetic primer
ttgaatgacttaattcagcgttttcataatcagcttcgtg

SEQ ID NO: 32854 - DNA, 40 bp, Artificial Sequence
  Description of Artificial Sequence: Synthetic primer
tggctctacagaacctagtcaggttttcgtttttaattgg

SEQ ID NO: 32855 - DNA, 40 bp, Artificial Sequence
  Description of Artificial Sequence: Synthetic primer
ggagagcctaataaactgttattacagtttctctactgac

SEQ ID NO: 32856 - DNA, 40 bp, Artificial Sequence
  Description of Artificial Sequence: Synthetic primer
taacaaatttggatcttggcacaatgataacagggtgttg

SEQ ID NO: 32857 - DNA, 40 bp, Artificial Sequence
  Description of Artificial Sequence: Synthetic primer
gccaaagtaccacacttcccggaggccgatagtctttacc

SEQ ID NO: 32858 - DNA, 40 bp, Artificial Sequence
  Description of Artificial Sequence: Synthetic primer
tcagatcttaacaggtttctgttgagccagaatctgtttc

SEQ ID NO: 32859 - DNA, 40 bp, Artificial Sequence
  Description of Artificial Sequence: Synthetic primer
atcactaaagaatgtgcatatggctgtgatcaggggcaag

SEQ ID NO: 32860 - DNA, 40 bp, Artificial Sequence
  Description of Artificial Sequence: Synthetic primer
ctgccccgttgacgtactgcatcacccgccctgccacgtc

SEQ ID NO: 32861 - DNA, 40 bp, Artificial Sequence
  Description of Artificial Sequence: Synthetic primer
tacctcatttctgtaaataaagttttgtgaatctgttttg

SEQ ID NO: 32862 - DNA, 40 bp, Artificial Sequence
  Description of Artificial Sequence: Synthetic primer
cagctttcattgaaactacctcctatcttgagtcttcact

SEQ ID NO: 32863 - DNA, 40 bp, Artificial Sequence
  Description of Artificial Sequence: Synthetic primer
actgtcaactcagtctctgattgaactttttgaatctttc

SEQ ID NO: 32864 - DNA, 40 bp, Artificial Sequence
  Description of Artificial Sequence: Synthetic primer
cacgctgcacggcacggccaggggcaagaccaagatgcag

SEQ ID NO: 32865 - DNA, 40 bp, Artificial Sequence
  Description of Artificial Sequence: Synthetic primer
tgattctgcatgcttggtgggggctggtagttagatggag

SEQ ID NO: 32866 - DNA, 40 bp, Artificial Sequence
  Description of Artificial Sequence: Synthetic primer
ccattcgaaatcagctgtactgtgtgaacgaaataaagac

SEQ ID NO: 32867 - DNA, 40 bp, Artificial Sequence
  Description of Artificial Sequence: Synthetic primer
agggcctgtgagtcaactaaaagtaggcagggcagagacc

SEQ ID NO: 32868 - DNA, 40 bp, Artificial Sequence
  Description of Artificial Sequence: Synthetic primer
tctaccacatataggtccttgggaaccgtgacagtaaatg

SEQ ID NO: 32869 - DNA, 40 bp, Artificial Sequence
  Description of Artificial Sequence: Synthetic primer
gacttccatgcatagataaaactattgacaaatgttctcc

SEQ ID NO: 32870 - DNA, 40 bp, Artificial Sequence
  Description of Artificial Sequence: Synthetic primer
acagcggggaatctctgacaggtcagcaacctggatctgc

SEQ ID NO: 32871 - DNA, 40 bp, Artificial Sequence
  Description of Artificial Sequence: Synthetic primer
aattgaaaaagaggaagaaaatcttcaggttgttttaagg

SEQ ID NO: 32872 - DNA, 40 bp, Artificial Sequence
  Description of Artificial Sequence: Synthetic primer
cccgcgcagtgcagtgcctccgcagtccagaggggagcag

SEQ ID NO: 32873 - DNA, 40 bp, Artificial Sequence
  Description of Artificial Sequence: Synthetic primer
aaaacaataccaagaacaattagaagaagaagtagctaag

SEQ ID NO: 32874 - DNA, 40 bp, Artificial Sequence
  Description of Artificial Sequence: Synthetic primer
tctgtttggcactttctagttctaactctaatttattgac

SEQ ID NO: 32875 - DNA, 40 bp, Artificial Sequence
  Description of Artificial Sequence: Synthetic primer
acttaaaaaagacttctaaggaggcagttggtgtctacag

SEQ ID NO: 32876 - DNA, 40 bp, Artificial Sequence
  Description of Artificial Sequence: Synthetic primer
tatatctctcttttggctgccagacccaaatactattttg

SEQ ID NO: 32877 - DNA, 40 bp, Artificial Sequence
  Description of Artificial Sequence: Synthetic primer
ctcacggggaagcactggaagatgcctccgataaggttac

SEQ ID NO: 32878 - DNA, 40 bp, Artificial Sequence
  Description of Artificial Sequence: Synthetic primer
ccagggggcctggagccacatcctccccaccagccagcag

SEQ ID NO: 32879 - DNA, 40 bp, Artificial Sequence
  Description of Artificial Sequence: Synthetic primer
tttgtaaccatcagagggcaccaccaaaaacttttgagaa

SEQ ID NO: 32880 - DNA, 40 bp, Artificial Sequence
  Description of Artificial Sequence: Synthetic primer
tttttttgaaatgaaaagactttttaaaaaagtaaaacaa

SEQ ID NO: 32881 - DNA, 40 bp, Artificial Sequence
  Description of Artificial Sequence: Synthetic primer
cgctcgccagtgaaggccaaacgctcccgtggtggtgagg

SEQ ID NO: 32882 - DNA, 40 bp, Artificial Sequence
  Description of Artificial Sequence: Synthetic primer
tgtgtggcagcaggcagcggggaggggaggaacagggaag

SEQ ID NO: 32883 - DNA, 40 bp, Artificial Sequence
  Description of Artificial Sequence: Synthetic primer
aaagctgaaaaggtacttggctttctgagggcggggcttg

SEQ ID NO: 32884 - DNA, 40 bp, Artificial Sequence
  Description of Artificial Sequence: Synthetic primer
ttgagctcaaagtagaggaaaagttactggtggtaccttg

SEQ ID NO: 32885 - DNA, 40 bp, Artificial Sequence
  Description of Artificial Sequence: Synthetic primer
gaaattgcattttccgagtgagactgcatgaagatgtctg

SEQ ID NO: 32886 - DNA, 40 bp, Artificial Sequence
  Description of Artificial Sequence: Synthetic primer
ggaggccaatgaaccccccttgaaccctcacggctcagcc

SEQ ID NO: 32887 - DNA, 40 bp, Artificial Sequence
  Description of Artificial Sequence: Synthetic primer
agggtgaagactgggccaacatgcagagggcctccacagc

SEQ ID NO: 32888 - DNA, 40 bp, Artificial Sequence
  Description of Artificial Sequence: Synthetic primer
aaagtgcctgccaaagccaagctcaccaaactgaagatgc

SEQ ID NO: 32889 - DNA, 40 bp, Artificial Sequence
  Description of Artificial Sequence: Synthetic primer
tgccaagcccttggcattccaattggagactggcgaaccc

SEQ ID NO: 32890 - DNA, 40 bp, Artificial Sequence
  Description of Artificial Sequence: Synthetic primer
ttaacgcagcagcgcctgtcataaacaagcctcttgtagc

SEQ ID NO: 32891 - DNA, 40 bp, Artificial Sequence
  Description of Artificial Sequence: Synthetic primer
agtttccaaagaaagtattaattcagaacaagccaaagac

SEQ ID NO: 32892 - DNA, 40 bp, Artificial Sequence
  Description of Artificial Sequence: Synthetic primer
aaatggcaccgagtcccagcgagccaagcagccccactac

SEQ ID NO: 32893 - DNA, 40 bp, Artificial Sequence
  Description of Artificial Sequence: Synthetic primer
gggtgagggcagtgcaggaagagccaagggccatgctgtg

SEQ ID NO: 32894 - DNA, 40 bp, Artificial Sequence
  Description of Artificial Sequence: Synthetic primer
ctgggccatgtcaaacccggaattttcaccaacagttcac

SEQ ID NO: 32895 - DNA, 40 bp, Artificial Sequence
  Description of Artificial Sequence: Synthetic primer
atccagccacatgggcagggccagtcacatctagtctatg

SEQ ID NO: 32896 - DNA, 40 bp, Artificial Sequence
  Description of Artificial Sequence: Synthetic primer
gagagcctgagcagtccaacgggggcttcccctgcaccac

SEQ ID NO: 32897 - DNA, 40 bp, Artificial Sequence
  Description of Artificial Sequence: Synthetic primer
agaacaaaaccgagaaaagaagccagaggaactcatctcc

SEQ ID NO: 32898 - DNA, 40 bp, Artificial Sequence
  Description of Artificial Sequence: Synthetic primer
aaactttttcttattcttttctgatgatctatttgctttc

SEQ ID NO: 32899 - DNA, 40 bp, Artificial Sequence
  Description of Artificial Sequence: Synthetic primer
gatcattgtcttcctcagcttccgaagagccagacaaaac

SEQ ID NO: 32900 - DNA, 40 bp, Artificial Sequence
  Description of Artificial Sequence: Synthetic primer
cctgttcttcaccgttatcatctatgttcggctggacttc

SEQ ID NO: 32901 - DNA, 40 bp, Artificial Sequence
  Description of Artificial Sequence: Synthetic primer
gtattggatttgcacgaagacgggttgggcgcggtggaag

SEQ ID NO: 32902 - DNA, 40 bp, Artificial Sequence
  Description of Artificial Sequence: Synthetic primer
tcgagtaacttggcacactgtgaggtatcccagagcaaac

SEQ ID NO: 32903 - DNA, 40 bp, Artificial Sequence
  Description of Artificial Sequence: Synthetic primer
ctcctccacctgctgctctagggcccgcttggacttctcc

SEQ ID NO: 32904 - DNA, 40 bp, Artificial Sequence
  Description of Artificial Sequence: Synthetic primer
tctggctgggggtgggcggcaccctggggtggctgaggtg

SEQ ID NO: 32905 - DNA, 40 bp, Artificial Sequence
  Description of Artificial Sequence: Synthetic primer
gggaatgtatcataagcggggagggggcttcgcggaggtg

SEQ ID NO: 32906 - DNA, 40 bp, Artificial Sequence
  Description of Artificial Sequence: Synthetic primer
aatttttttcttacagagagatttagagactcatagttgc

SEQ ID NO: 32907 - DNA, 40 bp, Artificial Sequence
  Description of Artificial Sequence: Synthetic primer
gcggatcttaacatcaaggatttcttgtaaacaatttaag

SEQ ID NO: 32908 - DNA, 40 bp, Artificial Sequence
  Description of Artificial Sequence: Synthetic primer
tctcctatcttagttacttttctccttcaactgtattttg

SEQ ID NO: 32909 - DNA, 40 bp, Artificial Sequence
  Description of Artificial Sequence: Synthetic primer
gagattctgcatcatcgtaacttttcttatattgtagacc

SEQ ID NO: 32910 - DNA, 40 bp, Artificial Sequence
  Description of Artificial Sequence: Synthetic primer
ccagctcgaccaccgaatcagagtttggataactggcaat

SEQ ID NO: 32911 - DNA, 40 bp, Artificial Sequence
  Description of Artificial Sequence: Synthetic primer
cacacacacactctaaggactagcaggcacctctgggaga

SEQ ID NO: 32912 - DNA, 40 bp, Artificial Sequence
  Description of Artificial Sequence: Synthetic primer
gagaggaagcggcgaagatggcgagatcgcccgcgacgtg

SEQ ID NO: 32913 - DNA, 40 bp, Artificial Sequence
  Description of Artificial Sequence: Synthetic primer
aaagtcttgcatcgttagcagcaaactgaacaatcaatgg

SEQ ID NO: 32914 - DNA, 40 bp, Artificial Sequence
  Description of Artificial Sequence: Synthetic primer
agcgggtttgagggcaatccagccggggcagtagcagcac

SEQ ID NO: 32915 - DNA, 40 bp, Artificial Sequence
  Description of Artificial Sequence: Synthetic primer
acggccgcctcctgcttctcccggcaaacctcgcccagga

SEQ ID NO: 32916 - DNA, 40 bp, Artificial Sequence
  Description of Artificial Sequence: Synthetic primer
catctgggatctgatcacacccacagcggatggccagact

SEQ ID NO: 32917 - DNA, 40 bp, Artificial Sequence
  Description of Artificial Sequence: Synthetic primer
ccaggtagtcattgatacagacatcaatatggtagtcacc

SEQ ID NO: 32918 - DNA, 40 bp, Artificial Sequence
  Description of Artificial Sequence: Synthetic primer
gacccacgagcatttcaacagctggagcgccggcttcgtc

SEQ ID NO: 32919 - DNA, 40 bp, Artificial Sequence
  Description of Artificial Sequence: Synthetic primer
atcttcaccatccagaccatccagtccaatttctcctact

SEQ ID NO: 32920 - DNA, 40 bp, Artificial Sequence
  Description of Artificial Sequence: Synthetic primer
ctgtcagtttggccttaaggactgggatgttttcctccag

SEQ ID NO: 32921 - DNA, 40 bp, Artificial Sequence
  Description of Artificial Sequence: Synthetic primer
caccccttcacctactagttcacttcacgaggatggtgtt

SEQ ID NO: 32922 - DNA, 40 bp, Artificial Sequence
  Description of Artificial Sequence: Synthetic primer
ggagtttgagaaactaatgtccagggagccggaaacagag

SEQ ID NO: 32923 - DNA, 40 bp, Artificial Sequence
  Description of Artificial Sequence: Synthetic primer
atccatgcttgcattcccagggatggccaccacgttacag

SEQ ID NO: 32924 - DNA, 40 bp, Artificial Sequence
  Description of Artificial Sequence: Synthetic primer
ggcgggaccagcgtggccaaggcacttttgggcaacatcc

SEQ ID NO: 32925 - DNA, 40 bp, Artificial Sequence
  Description of Artificial Sequence: Synthetic primer
aaaatactggagtttttatttctcttgtctttgttacatc

SEQ ID NO: 32926 - DNA, 40 bp, Artificial Sequence
  Description of Artificial Sequence: Synthetic primer
gaagttgatggaaccatccaacaggaacacaatgtctgct

SEQ ID NO: 32927 - DNA, 40 bp, Artificial Sequence
  Description of Artificial Sequence: Synthetic primer
aagatggaggacctgcggcgggagaaggatgctgccgaga

SEQ ID NO: 32928 - DNA, 40 bp, Artificial Sequence
  Description of Artificial Sequence: Synthetic primer
ggggttatgtcccagctaccatcaagatgaccgtggaaag

SEQ ID NO: 32929 - DNA, 40 bp, Artificial Sequence
  Description of Artificial Sequence: Synthetic primer
ccaatgtggatttttgtaagcatatcaggatgcctctcag

SEQ ID NO: 32930 - DNA, 40 bp, Artificial Sequence
  Description of Artificial Sequence: Synthetic primer
tatggaccagttctacatgaaagatggtgttactgcaaag

SEQ ID NO: 32931 - DNA, 40 bp, Artificial Sequence
  Description of Artificial Sequence: Synthetic primer
agcaggtcgcagcccgagtttggaaggatgtttggttaaa

SEQ ID NO: 32932 - DNA, 40 bp, Artificial Sequence
  Description of Artificial Sequence: Synthetic primer
cagtcctacatggaaagtgttgtgacttttctgcaggatg

SEQ ID NO: 32933 - DNA, 40 bp, Artificial Sequence
  Description of Artificial Sequence: Synthetic primer
ggcagacttggggatgtagtagaacagtgaggtcaggtag

SEQ ID NO: 32934 - DNA, 40 bp, Artificial Sequence
  Description of Artificial Sequence: Synthetic primer
cttgtctagcaggatgcaaatcctcaagtggtattaaaaa

SEQ ID NO: 32935 - DNA, 40 bp, Artificial Sequence
  Description of Artificial Sequence: Synthetic primer
gatgcatatccctcggtctacatcccataacctaacagta

SEQ ID NO: 32936 - DNA, 40 bp, Artificial Sequence
  Description of Artificial Sequence: Synthetic primer
taccacgttgaccgtggagaccaaatcctgttgtctggag

SEQ ID NO: 32937 - DNA, 40 bp, Artificial Sequence
  Description of Artificial Sequence: Synthetic primer
caagaaggggcgccccagcaccgccggctccaagatcaag

SEQ ID NO: 32938 - DNA, 40 bp, Artificial Sequence
  Description of Artificial Sequence: Synthetic primer
cctggcagtggagaagctggaggaggagtctttcaaaatg

SEQ ID NO: 32939 - DNA, 40 bp, Artificial Sequence
  Description of Artificial Sequence: Synthetic primer
tttgtgtattgtacgatgtaaacaatgaatggatgttact

SEQ ID NO: 32940 - DNA, 40 bp, Artificial Sequence
  Description of Artificial Sequence: Synthetic primer
gaaaaagtgtcttgagttgtggacccattagcaagtgaca

SEQ ID NO: 32941 - DNA, 40 bp, Artificial Sequence
  Description of Artificial Sequence: Synthetic primer
acagccatgatcaatagggaaacaggtactctctcgatgg

SEQ ID NO: 32942 - DNA, 40 bp, Artificial Sequence
  Description of Artificial Sequence: Synthetic primer
gacaacaaagagaagaaatctgccaaggatgcattgctgt

SEQ ID NO: 32943 - DNA, 40 bp, Artificial Sequence
  Description of Artificial Sequence: Synthetic primer
acccccatgctgagcagctgggtcaggacagcaccatcca

SEQ ID NO: 32944 - DNA, 40 bp, Artificial Sequence
  Description of Artificial Sequence: Synthetic primer
aatttgtctttcacataaagatctacataactgcgaaatc

SEQ ID NO: 32945 - DNA, 40 bp, Artificial Sequence
  Description of Artificial Sequence: Synthetic primer
gctgactgttgtcattctggaggcaaagaacctgaagaag

SEQ ID NO: 32946 - DNA, 40 bp, Artificial Sequence
  Description of Artificial Sequence: Synthetic primer
ctgtagctttacaccagaaggaaggaatgggctacagcag

SEQ ID NO: 32947 - DNA, 40 bp, Artificial Sequence
  Description of Artificial Sequence: Synthetic primer
tcccttgttcacacgccctgattcacggtgagacattttg

SEQ ID NO: 32948 - DNA, 40 bp, Artificial Sequence
  Description of Artificial Sequence: Synthetic primer
agcataacctgctggcctccaaagagatccatcagttcaa

SEQ ID NO: 32949 - DNA, 40 bp, Artificial Sequence
  Description of Artificial Sequence: Synthetic primer
ccttgtcacccgcataggccgcctggaggcgggctgcatc

SEQ ID NO: 32950 - DNA, 40 bp, Artificial Sequence
  Description of Artificial Sequence: Synthetic primer
gaactctgatccagtcaaatcttgagaagtgtcaattcaa

SEQ ID NO: 32951 - DNA, 40 bp, Artificial Sequence
  Description of Artificial Sequence: Synthetic primer
aagccaagttggcagaagacatcctgaacaccatgtttga

SEQ ID NO: 32952 - DNA, 40 bp, Artificial Sequence
  Description of Artificial Sequence: Synthetic primer
aagatgaaactcctcctgtgctttcttcatccatctcttc

SEQ ID NO: 32953 - DNA, 40 bp, Artificial Sequence
  Description of Artificial Sequence: Synthetic primer
atggcaaactgactgattatatcaatgccaattatgttga

SEQ ID NO: 32954 - DNA, 40 bp, Artificial Sequence
  Description of Artificial Sequence: Synthetic primer
acaataataaagctgatggtaaatgacatccagaatgtgt

SEQ ID NO: 32955 - DNA, 40 bp, Artificial Sequence
  Description of Artificial Sequence: Synthetic primer
agagccttctttgatgaagaggaagatcattggaaactac

SEQ ID NO: 32956 - DNA, 40 bp, Artificial Sequence
  Description of Artificial Sequence: Synthetic primer
caatccagtagtagatctcccagttgagggagccgctgtc

SEQ ID NO: 32957 - DNA, 40 bp, Artificial Sequence
  Description of Artificial Sequence: Synthetic primer
ctcccccggctgcctcgctctgaggagtggtaccttcgag

SEQ ID NO: 32958 - DNA, 40 bp, Artificial Sequence
  Description of Artificial Sequence: Synthetic primer
tcgtccacgtggatgtagtcataaatgttctggtgcatta

SEQ ID NO: 32959 - DNA, 40 bp, Artificial Sequence
  Description of Artificial Sequence: Synthetic primer
tccatgagctgtacgtgtagctggttgaggacatccctgt

SEQ ID NO: 32960 - DNA, 40 bp, Artificial Sequence
  Description of Artificial Sequence: Synthetic primer
aacattgccaatgggcctcaccatcctaacccaccccccg

SEQ ID NO: 32961 - DNA, 40 bp, Artificial Sequence
  Description of Artificial Sequence: Synthetic primer
acccgggcatcgctgactggccggctggatgaagtcctga

SEQ ID NO: 32962 - DNA, 40 bp, Artificial Sequence
  Description of Artificial Sequence: Synthetic primer
atcctgctggcagcttcgtcttcaacctccgctgggcaga

SEQ ID NO: 32963 - DNA, 40 bp, Artificial Sequence
  Description of Artificial Sequence: Synthetic primer
ctgtcaacatatttggcttcttaaaacacatccgttcaca

SEQ ID NO: 32964 - DNA, 40 bp, Artificial Sequence
  Description of Artificial Sequence: Synthetic primer
tggtcttgctggccgtcggaggcctcttgttctacaggtg

SEQ ID NO: 32965 - DNA, 40 bp, Artificial Sequence
  Description of Artificial Sequence: Synthetic primer
aagaccagccgggccctggtggccgacagccatcctgaaa

SEQ ID NO: 32966 - DNA, 40 bp, Artificial Sequence
  Description of Artificial Sequence: Synthetic primer
agaaatgagtgcactaatagaagaacgggatgctgccttg

SEQ ID NO: 32967 - DNA, 40 bp, Artificial Sequence
  Description of Artificial Sequence: Synthetic primer
catcacgattacagagtggctttcggaaaggatgctttca

SEQ ID NO: 32968 - DNA, 40 bp, Artificial Sequence
  Description of Artificial Sequence: Synthetic primer
tacccctgccccctgggctcgattatgggcccttcaggat

SEQ ID NO: 32969 - DNA, 40 bp, Artificial Sequence
  Description of Artificial Sequence: Synthetic primer
atccacctcctcgatcttcagactggactccacatccttg

SEQ ID NO: 32970 - DNA, 40 bp, Artificial Sequence
  Description of Artificial Sequence: Synthetic primer
tctcttcttaaaattcttcatcccaaagcgcttccgtcct

SEQ ID NO: 32971 - DNA, 40 bp, Artificial Sequence
  Description of Artificial Sequence: Synthetic primer
ctccctccgccctgtcactccagaggccctgctcagcatc

SEQ ID NO: 32972 - DNA, 40 bp, Artificial Sequence
  Description of Artificial Sequence: Synthetic primer
cacggatacgcctttctgaacaccaacaatggctacatcc

SEQ ID NO: 32973 - DNA, 40 bp, Artificial Sequence
  Description of Artificial Sequence: Synthetic primer
aacctgcaactgtatgttggatattttcaaaacaaccatc

SEQ ID NO: 32974 - DNA, 40 bp, Artificial Sequence
  Description of Artificial Sequence: Synthetic primer
cctggactgggctgcatctcagccccacctgcatggtatc

SEQ ID NO: 32975 - DNA, 40 bp, Artificial Sequence
  Description of Artificial Sequence: Synthetic primer
gatgtactgtcctctaagtaaaagtgtgcagtctggaagc

SEQ ID NO: 32976 - DNA, 40 bp, Artificial Sequence
  Description of Artificial Sequence: Synthetic primer
gatgcccacctcggagcatcccaggcccgtggcccatttt

SEQ ID NO: 32977 - DNA, 40 bp, Artificial Sequence
  Description of Artificial Sequence: Synthetic primer
aataaaaaggcattcccccttcatccccctaccttaaaca

SEQ ID NO: 32978 - DNA, 40 bp, Artificial Sequence
  Description of Artificial Sequence: Synthetic primer
cttgggtaaggacatgaagacagttcctgtcatacctttt

SEQ ID NO: 32979 - DNA, 40 bp, Artificial Sequence
  Description of Artificial Sequence: Synthetic primer
ccctgtgccccggggacgttctccaacacgacttcatcca

SEQ ID NO: 32980 - DNA, 40 bp, Artificial Sequence
  Description of Artificial Sequence: Synthetic primer
tgcagaagatattccaggaaatgctctacattatggactg

SEQ ID NO: 32981 - DNA, 40 bp, Artificial Sequence
  Description of Artificial Sequence: Synthetic primer
agttgttggcctggatgtacagcgcacgctctggctggat

SEQ ID NO: 32982 - DNA, 40 bp, Artificial Sequence
  Description of Artificial Sequence: Synthetic primer
atcccaatccaggcgaccccggtaaaaatatttctgcttt

SEQ ID NO: 32983 - DNA, 40 bp, Artificial Sequence
  Description of Artificial Sequence: Synthetic primer
aagtacgtcacgctgaagctcaacgatgtcatccgcttcg

SEQ ID NO: 32984 - DNA, 40 bp, Artificial Sequence
  Description of Artificial Sequence: Synthetic primer
ctgtgctgtagggcgccatccgactcggctccgggctgct

SEQ ID NO: 32985 - DNA, 40 bp, Artificial Sequence
  Description of Artificial Sequence: Synthetic primer
ctgcgaccagcagcaccaggaactgaagcactccatcctc

SEQ ID NO: 32986 - DNA, 40 bp, Artificial Sequence
  Description of Artificial Sequence: Synthetic primer
gctgatacggtagatgactatggagctgactccaactctg

SEQ ID NO: 32987 - DNA, 40 bp, Artificial Sequence
  Description of Artificial Sequence: Synthetic primer
cttagttggagactgtgatggaacagcgtagaggccatcc

SEQ ID NO: 32988 - DNA, 40 bp, Artificial Sequence
  Description of Artificial Sequence: Synthetic primer
gtttgtgccgcgttctcgccgcgggatggctcggctgact

SEQ ID NO: 32989 - DNA, 40 bp, Artificial Sequence
  Description of Artificial Sequence: Synthetic primer
gaccttgttgttgaagtactggattggagtccagcggatg

SEQ ID NO: 32990 - DNA, 40 bp, Artificial Sequence
  Description of Artificial Sequence: Synthetic primer
gaacttataagtgttataaaagaagaagctgccaataggg

SEQ ID NO: 32991 - DNA, 40 bp, Artificial Sequence
  Description of Artificial Sequence: Synthetic primer
cctgtccctgaaggaaggcctccaactgccaaatccacag

SEQ ID NO: 32992 - DNA, 40 bp, Artificial Sequence
  Description of Artificial Sequence: Synthetic primer
gatgtgactaaaatttttctggtgtcttctgccctctctt

SEQ ID NO: 32993 - DNA, 40 bp, Artificial Sequence
  Description of Artificial Sequence: Synthetic primer
ggagttcaccatctgggcaatgcagcggatcgccatgtcc

SEQ ID NO: 32994 - DNA, 40 bp, Artificial Sequence
  Description of Artificial Sequence: Synthetic primer
aacaaaaaataagtatgctgctttaaggcaagtgggcatc

SEQ ID NO: 32995 - DNA, 40 bp, Artificial Sequence
  Description of Artificial Sequence: Synthetic primer
atccaccaggaagactatgtctctcttgttgacttcaatg

SEQ ID NO: 32996 - DNA, 40 bp, Artificial Sequence
  Description of Artificial Sequence: Synthetic primer
acctgaggcaagtctacatttgtaggtgtggctgtttcag

SEQ ID NO: 32997 - DNA, 40 bp, Artificial Sequence
  Description of Artificial Sequence: Synthetic primer
acacaacaggatgctgttgctattgtcactactgcctctc

SEQ ID NO: 32998 - DNA, 40 bp, Artificial Sequence
  Description of Artificial Sequence: Synthetic primer
acactacgtttggttcaagcattccagtacactgacaaac

SEQ ID NO: 32999 - DNA, 40 bp, Artificial Sequence
  Description of Artificial Sequence: Synthetic primer
ggtcaaggactaatgcaccagcagcccatccaccccagtg

SEQ ID NO: 33000 - DNA, 40 bp, Artificial Sequence
  Description of Artificial Sequence: Synthetic primer
agttacaactaccaaacaattactttttattgtatcacac

SEQ ID NO: 33001 - DNA, 40 bp, Artificial Sequence
  Description of Artificial Sequence: Synthetic primer
gggagatcatccgcgtggttcatccccacaggccctgcaa

SEQ ID NO: 33002 - DNA, 40 bp, Artificial Sequence
  Description of Artificial Sequence: Synthetic primer
cgcctccctttcctaaacctttaccacctttgcctctacc

SEQ ID NO: 33003 - DNA, 40 bp, Artificial Sequence
  Description of Artificial Sequence: Synthetic primer
ccggtgtcccagctgtcgcaggccatccgtgagaacacag

SEQ ID NO: 33004 - DNA, 40 bp, Artificial Sequence
  Description of Artificial Sequence: Synthetic primer
aaaacttctaagattattctcctctatccacagcattcac

SEQ ID NO: 33005 - DNA, 40 bp, Artificial Sequence
  Description of Artificial Sequence: Synthetic primer
gaaatttaaagatggggaaaaaaagatggtataaaaatgg

SEQ ID NO: 33006 - DNA, 40 bp, Artificial Sequence
  Description of Artificial Sequence: Synthetic primer
gaaactgcaattttatggcattctaagtaactcatttaag

SEQ ID NO: 33007 - DNA, 40 bp, Artificial Sequence
  Description of Artificial Sequence: Synthetic primer
agctcactatagtcacattactgaggacaggcttctggtc

SEQ ID NO: 33008 - DNA, 40 bp, Artificial Sequence
  Description of Artificial Sequence: Synthetic primer
gtacaagtgcgaacactgccgggtgctcttcctggatcac

SEQ ID NO: 33009 - DNA, 40 bp, Artificial Sequence
  Description of Artificial Sequence: Synthetic primer
taaccaaactccagtattaaaaatctctcatgttgttttc

SEQ ID NO: 33010 - DNA, 40 bp, Artificial Sequence
  Description of Artificial Sequence: Synthetic primer
aagtgagttctgcctttcctttgatcgagggtcaaaatac

SEQ ID NO: 33011 - DNA, 40 bp, Artificial Sequence
  Description of Artificial Sequence: Synthetic primer
aactggaatcaagggaagactgttgtcaaaagcgacaagc

SEQ ID NO: 33012 - DNA, 40 bp, Artificial Sequence
  Description of Artificial Sequence: Synthetic primer
ggccgagtgctacaacctcagcccgaccaaggacaagatg

SEQ ID NO: 33013 - DNA, 40 bp, Artificial Sequence
  Description of Artificial Sequence: Synthetic primer
aactggacttatgtagacaaatcgtgatgccagtgtatcc

SEQ ID NO: 33014 - DNA, 40 bp, Artificial Sequence
  Description of Artificial Sequence: Synthetic primer
aataatcagacaatcaagtgtcatgtttaattctatttgc

SEQ ID NO: 33015 - DNA, 40 bp, Artificial Sequence
  Description of Artificial Sequence: Synthetic primer
tttagaaatgtggacaagctagttttcaaattttgtgtgc

SEQ ID NO: 33016 - DNA, 40 bp, Artificial Sequence
  Description of Artificial Sequence: Synthetic primer
ccagtgctgcagcagacattacttcaggacaacctcttgg

SEQ ID NO: 33017 - DNA, 40 bp, Artificial Sequence
  Description of Artificial Sequence: Synthetic primer
acaattgttcagaacctaggtaacaagtaaaatattgaag

SEQ ID NO: 33018 - DNA, 40 bp, Artificial Sequence
  Description of Artificial Sequence: Synthetic primer
cagtaaatccataagtttttctacaatcccattgtctacc

SEQ ID NO: 33019 - DNA, 40 bp, Artificial Sequence
  Description of Artificial Sequence: Synthetic primer
agagcccatgggtctccttttgagcaaacataaacaaatc

SEQ ID NO: 33020 - DNA, 40 bp, Artificial Sequence
  Description of Artificial Sequence: Synthetic primer
ctcttttgatgacccaccttcagctaaagcagctattgac

SEQ ID NO: 33021 - DNA, 40 bp, Artificial Sequence
  Description of Artificial Sequence: Synthetic primer
cagagtagaacagcagccagattatcgcaggcaagaaagc

SEQ ID NO: 33022 - DNA, 40 bp, Artificial Sequence
  Description of Artificial Sequence: Synthetic primer
agagccaactgagcactaaaccacttataaggcagagatg

SEQ ID NO: 33023 - DNA, 40 bp, Artificial Sequence
  Description of Artificial Sequence: Synthetic primer
ataaccttcttgtgcaccatgagtatttggaaagttaatc

SEQ ID NO: 33024 - DNA, 40 bp, Artificial Sequence
  Description of Artificial Sequence: Synthetic primer
attgctgctgctaccagcgccaaatgttcatcctcattgc

SEQ ID NO: 33025 - DNA, 40 bp, Artificial Sequence
  Description of Artificial Sequence: Synthetic primer
aaagagaagaaaacctaacatccttattaggaaagttaag

SEQ ID NO: 33026 - DNA, 40 bp, Artificial Sequence
  Description of Artificial Sequence: Synthetic primer
caagattctcaagcatcgtcatcatctaagctagggttgg

SEQ ID NO: 33027 - DNA, 40 bp, Artificial Sequence
  Description of Artificial Sequence: Synthetic primer
ttttacaaaaattttcttaaaaggcaataaaactgttgag

SEQ ID NO: 33028 - DNA, 40 bp, Artificial Sequence
  Description of Artificial Sequence: Synthetic primer
tctccctttagcagcatcacctctatttctctgttaggac

SEQ ID NO: 33029 - DNA, 40 bp, Artificial Sequence
  Description of Artificial Sequence: Synthetic primer
ccagcgctgcagcgtgtcactccagcaggcagactcatgg

SEQ ID NO: 33030 - DNA, 40 bp, Artificial Sequence
  Description of Artificial Sequence: Synthetic primer
gacaacatttgttgtctgtaatgaatgtggaaatcgatgg

SEQ ID NO: 33031 - DNA, 40 bp, Artificial Sequence
  Description of Artificial Sequence: Synthetic primer
acccaagctctgccggacatggtggtgtcccacctttttg

SEQ ID NO: 33032 - DNA, 40 bp, Artificial Sequence
  Description of Artificial Sequence: Synthetic primer
atttttcctaaatattgtgttggaaggaaaaattaaatac

SEQ ID NO: 33033 - DNA, 40 bp, Artificial Sequence
  Description of Artificial Sequence: Synthetic primer
ttttccctgccctcaggttgcctatgtattttaccttttc

SEQ ID NO: 33034 - DNA, 40 bp, Artificial Sequence
  Description of Artificial Sequence: Synthetic primer
tcctgggccccacctgttgcagatgatacacctgttctac

SEQ ID NO: 33035 - DNA, 40 bp, Artificial Sequence
  Description of Artificial Sequence: Synthetic primer
ctggccatggtcttctccatgggagaggcagtgccctatg

SEQ ID NO: 33036 - DNA, 40 bp, Artificial Sequence
  Description of Artificial Sequence: Synthetic primer
tctcagcctctgtgttaccgagggcattctaacagtcttc

SEQ ID NO: 33037 - DNA, 40 bp, Artificial Sequence
  Description of Artificial Sequence: Synthetic primer
catgtaattattaagttctgattgaagacagtgaaccaag

SEQ ID NO: 33038 - DNA, 40 bp, Artificial Sequence
  Description of Artificial Sequence: Synthetic primer
agatcccgagctctgcatggactgaaatggagtgttgtag

SEQ ID NO: 33039 - DNA, 40 bp, Artificial Sequence
  Description of Artificial Sequence: Synthetic primer
aaatgaaaaagaaatgaagcaagttgccaaagtcataacg

SEQ ID NO: 33040 - DNA, 40 bp, Artificial Sequence
  Description of Artificial Sequence: Synthetic primer
atataacaacagctttgcaacggaccttaattatactacc

SEQ ID NO: 33041 - DNA, 40 bp, Artificial Sequence
  Description of Artificial Sequence: Synthetic primer
aattgctgtaacagtatttcagcagatgctcgaaaagagc

SEQ ID NO: 33042 - DNA, 40 bp, Artificial Sequence
  Description of Artificial Sequence: Synthetic primer
cataatcagccaggacaattgaagttttaaaaaactgaac

SEQ ID NO: 33043 - DNA, 40 bp, Artificial Sequence
  Description of Artificial Sequence: Synthetic primer
ctaaccccaggccactgtcagtgctctgctccctcgaatg

SEQ ID NO: 33044 - DNA, 40 bp, Artificial Sequence
  Description of Artificial Sequence: Synthetic primer
tcttgcacaggtcttctgccatttcactgtgattagtttc

SEQ ID NO: 33045 - DNA, 40 bp, Artificial Sequence
  Description of Artificial Sequence: Synthetic primer
actatgatatacatgtgtatatttttgcaaacacaggatc

SEQ ID NO: 33046 - DNA, 40 bp, Artificial Sequence
  Description of Artificial Sequence: Synthetic primer
cgattcgacattttgactcaataaataattccaacttgtg

SEQ ID NO: 33047 - DNA, 40 bp, Artificial Sequence
  Description of Artificial Sequence: Synthetic primer
tcctttggccaaaacacattcccctcttttaatgtcatgg

SEQ ID NO: 33048 - DNA, 40 bp, Artificial Sequence
  Description of Artificial Sequence: Synthetic primer
cactctgacttcttcatctgagccaaaacctaagaattgc

SEQ ID NO: 33049 - DNA, 40 bp, Artificial Sequence
  Description of Artificial Sequence: Synthetic primer
gcacctgtactttccagttcagaatgaggcgacgatgttg

SEQ ID NO: 33050 - DNA, 40 bp, Artificial Sequence
  Description of Artificial Sequence: Synthetic primer
ctattttttaaaaaaatattggcctataatatgtgtattg

SEQ ID NO: 33051 - DNA, 40 bp, Artificial Sequence
  Description of Artificial Sequence: Synthetic primer
ttgtttgtttctatgtcaactagatatgattaaaaataag

SEQ ID NO: 33052 - DNA, 40 bp, Artificial Sequence
  Description of Artificial Sequence: Synthetic primer
tttcttccaagtattttattttttattagttttctttggc

SEQ ID NO: 33053 - DNA, 40 bp, Artificial Sequence
  Description of Artificial Sequence: Synthetic primer
ctgtcgtgccgcttgtgaaacacacaatggagaggtcatc

SEQ ID NO: 33054 - DNA, 40 bp, Artificial Sequence
  Description of Artificial Sequence: Synthetic primer
aaggagctttggatacttttttagaaggataaatattatg

SEQ ID NO: 33055 - DNA, 40 bp, Artificial Sequence
  Description of Artificial Sequence: Synthetic primer
gacctaggaagaagctgagctgaattcctccagggcccag

SEQ ID NO: 33056 - DNA, 40 bp, Artificial Sequence
  Description of Artificial Sequence: Synthetic primer
cgtaagatacttttttgcataaaacaaagttaaaaaatag

SEQ ID NO: 33057 - DNA, 40 bp, Artificial Sequence
  Description of Artificial Sequence: Synthetic primer
ttttaaaaaagttgaccattcattattgctggaactgaag

SEQ ID NO: 33058 - DNA, 40 bp, Artificial Sequence
  Description of Artificial Sequence: Synthetic primer
gctaatgtatcttaaagttaagatcttgaattaaagtgag

SEQ ID NO: 33059 - DNA, 40 bp, Artificial Sequence
  Description of Artificial Sequence: Synthetic primer
ccgtaggcataaatggcttcactccgttctttcttctctg

SEQ ID NO: 33060 - DNA, 40 bp, Artificial Sequence
  Description of Artificial Sequence: Synthetic primer
agatatcaccactttgtctgtcgagcctgataaaaaggac

SEQ ID NO: 33061 - DNA, 40 bp, Artificial Sequence
  Description of Artificial Sequence: Synthetic primer
tggcttggtattgaggtaaagagtttcgcttacaaaaatg

SEQ ID NO: 33062 - DNA, 40 bp, Artificial Sequence
  Description of Artificial Sequence: Synthetic primer
aattggaaaagagaatgcaggaatttcggagctcagatgg

SEQ ID NO: 33063 - DNA, 40 bp, Artificial Sequence
  Description of Artificial Sequence: Synthetic primer
gatgagagctggttgcagtagaggcctgtgtgtctcagtg

SEQ ID NO: 33064 - DNA, 40 bp, Artificial Sequence
  Description of Artificial Sequence: Synthetic primer
gaaagtactaaaccctgagctcatcaagggtccttggacc

SEQ ID NO: 33065 - DNA, 40 bp, Artificial Sequence
  Description of Artificial Sequence: Synthetic primer
taaggaaagttatcaagctgcaatggaataaaataaaatg

SEQ ID NO: 33066 - DNA, 40 bp, Artificial Sequence
  Description of Artificial Sequence: Synthetic primer
cagccgacacagatttgacaagagaagcccaaaccatatc

SEQ ID NO: 33067 - DNA, 40 bp, Artificial Sequence
  Description of Artificial Sequence: Synthetic primer
gtacctgtcatcaggctcactgaggggtgaaagaagttcc

SEQ ID NO: 33068 - DNA, 40 bp, Artificial Sequence
  Description of Artificial Sequence: Synthetic primer
cacatcttctgtgatcagcatggcagtggtgagtttagtc

SEQ ID NO: 33069 - DNA, 40 bp, Artificial Sequence
  Description of Artificial Sequence: Synthetic primer
tatagctttgaaactaccctttaaataccttcattttctc

SEQ ID NO: 33070 - DNA, 40 bp, Artificial Sequence
  Description of Artificial Sequence: Synthetic primer
tccctcctttcctgtggtgtgctcagctcttaacgtctcc

SEQ ID NO: 33071 - DNA, 40 bp, Artificial Sequence
  Description of Artificial Sequence: Synthetic primer
agtgtctccagcagcttttactatttttgactggataagc

SEQ ID NO: 33072 - DNA, 40 bp, Artificial Sequence
  Description of Artificial Sequence: Synthetic primer
gcagttatgaagcatactaagaagggaaatccaagtgttg

SEQ ID NO: 33073 - DNA, 40 bp, Artificial Sequence
  Description of Artificial Sequence: Synthetic primer
tgataagagagaaatgatttttgaagttcttgctccattg

SEQ ID NO: 33074 - DNA, 40 bp, Artificial Sequence
  Description of Artificial Sequence: Synthetic primer
cattcaaacatgcacttgcagctcaagaaattaaatacgg

SEQ ID NO: 33075 - DNA, 40 bp, Artificial Sequence
  Description of Artificial Sequence: Synthetic primer
aacccattaagtggtctgtatgtgagttactaatgagagg

SEQ ID NO: 33076 - DNA, 40 bp, Artificial Sequence
  Description of Artificial Sequence: Synthetic primer
cacaagaagacacagatgtgtgcaagctctaaatgatctc

SEQ ID NO: 33077 - DNA, 40 bp, Artificial Sequence
  Description of Artificial Sequence: Synthetic primer
ggtgtgcttggagtcagctgaggtgttgagaaggagaaag

SEQ ID NO: 33078 - DNA, 40 bp, Artificial Sequence
  Description of Artificial Sequence: Synthetic primer
acaagtttgatcctccgaatctggagatgttgtagagctg

SEQ ID NO: 33079 - DNA, 40 bp, Artificial Sequence
  Description of Artificial Sequence: Synthetic primer
aggagacccacggttggtgctcaaataccagagaagatcc

SEQ ID NO: 33080 - DNA, 40 bp, Artificial Sequence
  Description of Artificial Sequence: Synthetic primer
tggagacagaaatatagagcttggtggaaggccgttctcg

SEQ ID NO: 33081 - DNA, 40 bp, Artificial Sequence
  Description of Artificial Sequence: Synthetic primer
tgctcagtactgactttggtatgtgtgttctgctgtcctg

SEQ ID NO: 33082 - DNA, 40 bp, Artificial Sequence
  Description of Artificial Sequence: Synthetic primer
ctgtaatattgggaaatcaagtggcttatcatgtatatcg

SEQ ID NO: 33083 - DNA, 40 bp, Artificial Sequence
  Description of Artificial Sequence: Synthetic primer
tccttaaggaagatcatgaaggccttggcatttcaattac

SEQ ID NO: 33084 - DNA, 40 bp, Artificial Sequence
  Description of Artificial Sequence: Synthetic primer
gtggtaatcacaggcccctggaccatcatcaaaagtacag

SEQ ID NO: 33085 - DNA, 40 bp, Artificial Sequence
  Description of Artificial Sequence: Synthetic primer
tctgcttgcattgtgatggttacaaatttagttgaggttg

SEQ ID NO: 33086 - DNA, 40 bp, Artificial Sequence
  Description of Artificial Sequence: Synthetic primer
tatactgaatatagtgcatatcaccatgaagactttcagc

SEQ ID NO: 33087 - DNA, 40 bp, Artificial Sequence
  Description of Artificial Sequence: Synthetic primer
tgggaggggtcaggaatcatgaaggagggtagagaagagg

SEQ ID NO: 33088 - DNA, 40 bp, Artificial Sequence
  Description of Artificial Sequence: Synthetic primer
ctctttacctccccttgcaaaaaacagaggcaagtttccc

SEQ ID NO: 33089 - DNA, 40 bp, Artificial Sequence
  Description of Artificial Sequence: Synthetic primer
atcacagagaacttaagactgacaatctacctaatcaagc

SEQ ID NO: 33090 - DNA, 40 bp, Artificial Sequence
  Description of Artificial Sequence: Synthetic primer
aatttgagctaccacaacatctggacattgagctgcttcg

SEQ ID NO: 33091 - DNA, 40 bp, Artificial Sequence
  Description of Artificial Sequence: Synthetic primer
gaaggttatttttgtagaaaccatggtaaaaagggaaaag

SEQ ID NO: 33092 - DNA, 40 bp, Artificial Sequence
  Description of Artificial Sequence: Synthetic primer
atcaactcaaatagttctgcaagaattgtggattcacttg

SEQ ID NO: 33093 - DNA, 40 bp, Artificial Sequence
  Description of Artificial Sequence: Synthetic primer
ggaggggctggtgttcctggcgtgcctggggcaattcctg

SEQ ID NO: 33094 - DNA, 40 bp, Artificial Sequence
  Description of Artificial Sequence: Synthetic primer
gaccattaaacaggagcagaacttggaccagacctacttg

SEQ ID NO: 33095 - DNA, 40 bp, Artificial Sequence
  Description of Artificial Sequence: Synthetic primer
aataaccaccagctacagcttgctggagcattggcaattg

SEQ ID NO: 33096 - DNA, 40 bp, Artificial Sequence
  Description of Artificial Sequence: Synthetic primer
ccatgcctgcatggctgtacgatctacttcctttaacttc

SEQ ID NO: 33097 - DNA, 40 bp, Artificial Sequence
  Description of Artificial Sequence: Synthetic primer
tcccgcccgccaggcggcgccggcgcgcagccaagaaggg

SEQ ID NO: 33098 - DNA, 40 bp, Artificial Sequence
  Description of Artificial Sequence: Synthetic primer
cctgcctgaattgcacctgcgggtggaggctccggctgtg

SEQ ID NO: 33099 - DNA, 40 bp, Artificial Sequence
  Description of Artificial Sequence: Synthetic primer
ggatactacgtgattccagtggtacaagtcgtggtgttgg

SEQ ID NO: 33100 - DNA, 40 bp, Artificial Sequence
  Description of Artificial Sequence: Synthetic primer
atccaactgttgtgatttccagtgacttctatgtttgttc

SEQ ID NO: 33101 - DNA, 40 bp, Artificial Sequence
  Description of Artificial Sequence: Synthetic primer
gttagacgaacattcttaaaaactgaaaaggggaattttg

SEQ ID NO: 33102 - DNA, 40 bp, Artificial Sequence
  Description of Artificial Sequence: Synthetic primer
ttgtttctgttttaattataccattaaaaatcagctttag

SEQ ID NO: 33103 - DNA, 40 bp, Artificial Sequence
  Description of Artificial Sequence: Synthetic primer
tttcctatttgtccaacatatccacttgaatgaaaacgtc

SEQ ID NO: 33104 - DNA, 40 bp, Artificial Sequence
  Description of Artificial Sequence: Synthetic primer
tgaagactttttgcttgccctacagatgaatgaagaacag

SEQ ID NO: 33105 - DNA, 40 bp, Artificial Sequence
  Description of Artificial Sequence: Synthetic primer
tccttccatgttcaatggctggactttgttgaggtttctc

SEQ ID NO: 33106 - DNA, 40 bp, Artificial Sequence
  Description of Artificial Sequence: Synthetic primer
ttccccaacacttcaatggcaacagcaacaagtggcacag

SEQ ID NO: 33107 - DNA, 40 bp, Artificial Sequence
  Description of Artificial Sequence: Synthetic primer
tcagctcatcacagatttttgtcagttcttcaatttcttg

SEQ ID NO: 33108 - DNA, 40 bp, Artificial Sequence
  Description of Artificial Sequence: Synthetic primer
ctgtagagcagttcttacttgactatgcttcagggaaaag

SEQ ID NO: 33109 - DNA, 40 bp, Artificial Sequence
  Description of Artificial Sequence: Synthetic primer
ggtggtgtgacatgaggaccgttcctaggatgggacagtg

SEQ ID NO: 33110 - DNA, 40 bp, Artificial Sequence
  Description of Artificial Sequence: Synthetic primer
ggcagcgggacggccgcgcccagcgcgctcggctcccggc

SEQ ID NO: 33111 - DNA, 40 bp, Artificial Sequence
  Description of Artificial Sequence: Synthetic primer
caggcctgcgtctggatacgtgccagaggagatctggaag

SEQ ID NO: 33112 - DNA, 40 bp, Artificial Sequence
  Description of Artificial Sequence: Synthetic primer
tttatggaaagtacagtttaagaggagaatttgattagac

SEQ ID NO: 33113 - DNA, 40 bp, Artificial Sequence
  Description of Artificial Sequence: Synthetic primer
cactggttttgatgaaactgtctagtacaacatcaagcag

SEQ ID NO: 33114 - DNA, 40 bp, Artificial Sequence
  Description of Artificial Sequence: Synthetic primer
tgtcccatcattcaatatgaatctataggaggggctggag

SEQ ID NO: 33115 - DNA, 40 bp, Artificial Sequence
  Description of Artificial Sequence: Synthetic primer
agttggcctcacgttgcattccccacttaaaatactgctg

SEQ ID NO: 33116 - DNA, 40 bp, Artificial Sequence
  Description of Artificial Sequence: Synthetic primer
gcttcactgcttttagttccaggcagtttcattgtacatc

SEQ ID NO: 33117 - DNA, 40 bp, Artificial Sequence
  Description of Artificial Sequence: Synthetic primer
gactcagcctgcagttaattagcattctggcagttttgac

SEQ ID NO: 33118 - DNA, 40 bp, Artificial Sequence
  Description of Artificial Sequence: Synthetic primer
tttcttggctggaacttgggtaaattaacctgtaattatg

SEQ ID NO: 33119 - DNA, 40 bp, Artificial Sequence
  Description of Artificial Sequence: Synthetic primer
agatgtctctttcttcagattgcccaggctgctggacttc

SEQ ID NO: 33120 - DNA, 40 bp, Artificial Sequence
  Description of Artificial Sequence: Synthetic primer
tgtcatctgggttgaatgtagttgattgacttctcctaag

SEQ ID NO: 33121 - DNA, 40 bp, Artificial Sequence
  Description of Artificial Sequence: Synthetic primer
ttatttttctttaaaattttccaagatcatattacttgac

SEQ ID NO: 33122 - DNA, 40 bp, Artificial Sequence
  Description of Artificial Sequence: Synthetic primer
agccgttcactccgctattactatgagaaaggaattatgc

SEQ ID NO: 33123 - DNA, 40 bp, Artificial Sequence
  Description of Artificial Sequence: Synthetic primer
tttaagctagttggctttacaacacattataaaattagag

SEQ ID NO: 33124 - DNA, 40 bp, Artificial Sequence
  Description of Artificial Sequence: Synthetic primer
cagaagggacagtgagacagataggtgcattctctgaagg

SEQ ID NO: 33125 - DNA, 40 bp, Artificial Sequence
  Description of Artificial Sequence: Synthetic primer
ttgggctgtacttctatcgtccagcgcatgctcactgttg

SEQ ID NO: 33126 - DNA, 40 bp, Artificial Sequence
  Description of Artificial Sequence: Synthetic primer
cctaagagctactccatgaagtagtaagattttaacagtg

SEQ ID NO: 33127 - DNA, 40 bp, Artificial Sequence
  Description of Artificial Sequence: Synthetic primer
gagagcttgaaacgagaactccaggacaagaaacagcatc

SEQ ID NO: 33128 - DNA, 40 bp, Artificial Sequence
  Description of Artificial Sequence: Synthetic primer
ttgaagctctttactgtaaaggcaagccagcatgtgtgtc

SEQ ID NO: 33129 - DNA, 40 bp, Artificial Sequence
  Description of Artificial Sequence: Synthetic primer
actgcaaataattatgtgtgtatgtatatgtgtgggaaag

SEQ ID NO: 33130 - DNA, 40 bp, Artificial Sequence
  Description of Artificial Sequence: Synthetic primer
ccggtctttaggctgtgttgttcgcccaggtttctgcatc

SEQ ID NO: 33131 - DNA, 40 bp, Artificial Sequence
  Description of Artificial Sequence: Synthetic primer
tttgggtcctagaacctgttgagtttctaatgaatatttg

SEQ ID NO: 33132 - DNA, 40 bp, Artificial Sequence
  Description of Artificial Sequence: Synthetic primer
atgagggtctgagacggtgggagcggttgtgtgaagatgg

SEQ ID NO: 33133 - DNA, 40 bp, Artificial Sequence
  Description of Artificial Sequence: Synthetic primer
gtggggcgggacagcgtcggcctgatttcccgtaaaggtg

SEQ ID NO: 33134 - DNA, 40 bp, Artificial Sequence
  Description of Artificial Sequence: Synthetic primer
cctgcttttcctttttttcatcttgcttctaaattttcag

SEQ ID NO: 33135 - DNA, 40 bp, Artificial Sequence
  Description of Artificial Sequence: Synthetic primer
aagataggattgtcttcctcacccaaaatgccttcaagtg

SEQ ID NO: 33136 - DNA, 40 bp, Artificial Sequence
  Description of Artificial Sequence: Synthetic primer
tccaacccagactcggggatgtattctcctagccgctacc

SEQ ID NO: 33137 - DNA, 40 bp, Artificial Sequence
  Description of Artificial Sequence: Synthetic primer
atattaaaattcttctaaaatattgcttttcttttaagtg

SEQ ID NO: 33138 - DNA, 40 bp, Artificial Sequence
  Description of Artificial Sequence: Synthetic primer
gtgctcgagaggcacctgcggagccccgtgctcacctttg

SEQ ID NO: 33139 - DNA, 40 bp, Artificial Sequence
  Description of Artificial Sequence: Synthetic primer
ggtgggtctcgcagtactgatgctgcacttgactttaccc

SEQ ID NO: 33140 - DNA, 40 bp, Artificial Sequence
  Description of Artificial Sequence: Synthetic primer
taagaagcattaagtctttgaactgaatgtattttgcatc

SEQ ID NO: 33141 - DNA, 40 bp, Artificial Sequence
  Description of Artificial Sequence: Synthetic primer
ggtcaccttcaatcgaggcacgaagcactgacctccctac

SEQ ID NO: 33142 - DNA, 40 bp, Artificial Sequence
  Description of Artificial Sequence: Synthetic primer
ctatccgtcctaggccctgggtcagaatgggcggagaagc

SEQ ID NO: 33143 - DNA, 40 bp, Artificial Sequence
  Description of Artificial Sequence: Synthetic primer
acatgcacccttataagtctgtaccctgatatgaaaatag

SEQ ID NO: 33144 - DNA, 40 bp, Artificial Sequence
  Description of Artificial Sequence: Synthetic primer
atggggacttcccatccggcgttcctggtcttaggctgtc

SEQ ID NO: 33145 - DNA, 40 bp, Artificial Sequence; identical to SEQ ID NO: 8932
  Description of Artificial Sequence: Synthetic primer

SEQ ID NO: 33146 - DNA, 40 bp, Artificial Sequence
  Description of Artificial Sequence: Synthetic primer
ggggcagccgcagggagcagcagtgatagcgaggagacac

SEQ ID NO: 33147 - DNA, 40 bp, Artificial Sequence
  Description of Artificial Sequence: Synthetic primer
aacaaatgatctttgaggaacatggttttaggcggaccac

SEQ ID NO: 33148 - DNA, 40 bp, Artificial Sequence
  Description of Artificial Sequence: Synthetic primer
cctcacagtcccagggcatatccagctcctctaccagcac

SEQ ID NO: 33149 - DNA, 40 bp, Artificial Sequence
  Description of Artificial Sequence: Synthetic primer
tggaggaaggtggggagggagtggccttgccagccctgtg

SEQ ID NO: 33150 - DNA, 40 bp, Artificial Sequence
  Description of Artificial Sequence: Synthetic primer
ggccactcctgccaagcacagtagcagcaccagcagcaag

SEQ ID NO: 33151 - DNA, 40 bp, Artificial Sequence
  Description of Artificial Sequence: Synthetic primer
acgcccgcaacaagcaccgaggagttaagagagccgcaag

SEQ ID NO: 33152 - DNA, 40 bp, Artificial Sequence
  Description of Artificial Sequence: Synthetic primer
ccactgtgatcttctatgtatgcaatgtaagagtttttag

SEQ ID NO: 33153 - DNA, 40 bp, Artificial Sequence
  Description of Artificial Sequence: Synthetic primer
aaacctaacacggcacttgagaacccacacaggagagcag

SEQ ID NO: 33154 - DNA, 40 bp, Artificial Sequence
  Description of Artificial Sequence: Synthetic primer
catctcttaatgccttaggataaactgactgatcatctac

SEQ ID NO: 33155 - DNA, 40 bp, Artificial Sequence
  Description of Artificial Sequence: Synthetic primer
gcagtgctccaggcgcagctcaggctcctccaggctcacc

SEQ ID NO: 33156 - DNA, 40 bp, Artificial Sequence
  Description of Artificial Sequence: Synthetic primer
cttcttttgtgaagagaacatgattggcaatactctgaag

SEQ ID NO: 33157 - DNA, 40 bp, Artificial Sequence
  Description of Artificial Sequence: Synthetic primer
aatccagagaaccatcaagccagatgtcagaagctacacc

SEQ ID NO: 33158 - DNA, 40 bp, Artificial Sequence
  Description of Artificial Sequence: Synthetic primer
aaaggagacatttcttaagtgaagcacctccatctctttg

SEQ ID NO: 33159 - DNA, 40 bp, Artificial Sequence
  Description of Artificial Sequence: Synthetic primer
cgacatgctgagagcgaatgtgccgctgaaggttgctagg

SEQ ID NO: 33160 - DNA, 40 bp, Artificial Sequence
  Description of Artificial Sequence: Synthetic primer
agttcagtaaggactgtggccgaatgctcaccagaatgtg

SEQ ID NO: 33161 - DNA, 40 bp, Artificial Sequence
  Description of Artificial Sequence: Synthetic primer
gtgtgttggagctcatggacgcgttggactccagggacac

SEQ ID NO: 33162 - DNA, 40 bp, Artificial Sequence
  Description of Artificial Sequence: Synthetic primer
tatgatctagagcagaaagtccacttttatattcttcctc

SEQ ID NO: 33163 - DNA, 40 bp, Artificial Sequence
  Description of Artificial Sequence: Synthetic primer
tggcccaggcacctcctgtctacctggatgtcctgggcta

SEQ ID NO: 33164 - DNA, 40 bp, Artificial Sequence
  Description of Artificial Sequence: Synthetic primer
cggcatgtccagagatgtctacagcacggattattacagg

SEQ ID NO: 33165 - DNA, 40 bp, Artificial Sequence
  Description of Artificial Sequence: Synthetic primer
gtttgacagcctgtttccagtcatctatacccagctaatg

SEQ ID NO: 33166 - DNA, 40 bp, Artificial Sequence
  Description of Artificial Sequence: Synthetic primer
atggactggtcattaatatcattcactctctgtgtacttg

SEQ ID NO: 33167 - DNA, 40 bp, Artificial Sequence
  Description of Artificial Sequence: Synthetic primer
cggggcgctggcctcaggtttcaccggccccatgtcactg

SEQ ID NO: 33168 - DNA, 40 bp, Artificial Sequence
  Description of Artificial Sequence: Synthetic primer
ctggtgctgcctgcgaggccgtcctcggggtggctgcctc

SEQ ID NO: 33169 - DNA, 40 bp, Artificial Sequence
  Description of Artificial Sequence: Synthetic primer
ccgcctcaggaagcccaggaaatgctcggccgtgcggatg

SEQ ID NO: 33170 - DNA, 40 bp, Artificial Sequence
  Description of Artificial Sequence: Synthetic primer
gccatgtaaacatcaacaggccagaccccacttcctccag

SEQ ID NO: 33171 - DNA, 40 bp, Artificial Sequence
  Description of Artificial Sequence: Synthetic primer
tccataatggaccaaggtcgtcacgttaacacaatgtcac

SEQ ID NO: 33172 - DNA, 40 bp, Artificial Sequence
  Description of Artificial Sequence: Synthetic primer
gctagatttccaggggtgaaatccaatctacacttttaac

SEQ ID NO: 33173 - DNA, 40 bp, Artificial Sequence
  Description of Artificial Sequence: Synthetic primer
ccgtgtagggcaggaagccagacggcagcgccctgagaag

SEQ ID NO: 33174 - DNA, 40 bp, Artificial Sequence
  Description of Artificial Sequence: Synthetic primer
ttgggcagctgtactagagttacggtgggagcagatgatg

SEQ ID NO: 33175 - DNA, 40 bp, Artificial Sequence
  Description of Artificial Sequence: Synthetic primer
tggagctgtaaagccacccacaaacaaactacccattttc

SEQ ID NO: 33176 - DNA, 40 bp, Artificial Sequence
  Description of Artificial Sequence: Synthetic primer
tgtttgtttctttcttgttttgcatcaacttttatcagtc

SEQ ID NO: 33177 - DNA, 40 bp, Artificial Sequence
  Description of Artificial Sequence: Synthetic primer
gtttcggtccccggcctgactctcccaccccctgtacacc

SEQ ID NO: 33178 - DNA, 40 bp, Artificial Sequence
  Description of Artificial Sequence: Synthetic primer
ggcctaccttgacacatgctctccttcaaaatgctaattc

SEQ ID NO: 33179 - DNA, 40 bp, Artificial Sequence
  Description of Artificial Sequence: Synthetic primer
tcaatatatggcaaagatctgatgtactttatatgtgaat

SEQ ID NO: 33180 - DNA, 40 bp, Artificial Sequence
  Description of Artificial Sequence: Synthetic primer
aggccattatgttctttccagagtccctgacacttcctac

SEQ ID NO: 33181 - DNA, 40 bp, Artificial Sequence
  Description of Artificial Sequence: Synthetic primer
ttccaaggttctctgcattcataagattctccttttcgtg

SEQ ID NO: 33182 - DNA, 40 bp, Artificial Sequence
  Description of Artificial Sequence: Synthetic primer
accacagtctccctcctatttggccactccaagccacagg

SEQ ID NO: 33183 - DNA, 40 bp, Artificial Sequence
  Description of Artificial Sequence: Synthetic primer
gagtggcaggctcctcacagccttcctgaatctgggactc

SEQ ID NO: 33184 - DNA, 40 bp, Artificial Sequence
  Description of Artificial Sequence: Synthetic primer
caaatggtgtcaaatatgagaaactatatgcagaaattag

SEQ ID NO: 33185 - DNA, 40 bp, Artificial Sequence
  Description of Artificial Sequence: Synthetic primer
ctcccaactccccgttgctcccactggggaccagccatgc

SEQ ID NO: 33186 - DNA, 40 bp, Artificial Sequence
  Description of Artificial Sequence: Synthetic primer
agtaagtaaaagaggaatcgctcagatctttccttggatg

SEQ ID NO: 33187 - DNA, 40 bp, Artificial Sequence
  Description of Artificial Sequence: Synthetic primer
cgagaagctgtcctggtgactctttccacctgtggttttg

SEQ ID NO: 33188 - DNA, 40 bp, Artificial Sequence
  Description of Artificial Sequence: Synthetic primer
ggggcactggcttagagacccctgacaggaaaggcaaagg

SEQ ID NO: 33189 - DNA, 40 bp, Artificial Sequence
  Description of Artificial Sequence: Synthetic primer
gcggagtcctttggtcccaggcatcatcacagttattgac

SEQ ID NO: 33190 - DNA, 40 bp, Artificial Sequence
  Description of Artificial Sequence: Synthetic primer
agccacggtggcatccagcaggcagcgccaggcaccgaac

SEQ ID NO: 33191 - DNA, 40 bp, Artificial Sequence
  Description of Artificial Sequence: Synthetic primer
ttagcttttctttcaaccggtcctggtttatccctagcag

SEQ ID NO: 33192 - DNA, 40 bp, Artificial Sequence
  Description of Artificial Sequence: Synthetic primer
acagatgacattggtcactgataccaccacatacctgtag

SEQ ID NO: 33193 - DNA, 40 bp, Artificial Sequence
  Description of Artificial Sequence: Synthetic primer
tggccgacatggagattgggaaaagcatgatcagtgtagg

SEQ ID NO: 33194 - DNA, 40 bp, Artificial Sequence
  Description of Artificial Sequence: Synthetic primer
gcggtcattcttgtcgaactcaaagatatactgcctctgg

SEQ ID NO: 33195 - DNA, 40 bp, Artificial Sequence
  Description of Artificial Sequence: Synthetic primer
caatgcccaggtcaccaccgagaaccagctcaagtatctg

SEQ ID NO: 33196 - DNA, 40 bp, Artificial Sequence
  Description of Artificial Sequence: Synthetic primer
tgtgttttgaaaactacacataaaaactaacagcattcac

SEQ ID NO: 33197 - DNA, 40 bp, Artificial Sequence
  Description of Artificial Sequence: Synthetic primer
gagcccaaggcctgcagcactcgggggctgatctcatctg

SEQ ID NO: 33198 - DNA, 40 bp, Artificial Sequence
  Description of Artificial Sequence: Synthetic primer
tctccagaatctatgaaactgtcctctggaaagaaactac

SEQ ID NO: 33199 - DNA, 40 bp, Artificial Sequence
  Description of Artificial Sequence: Synthetic primer
cctgtgttctaagtagaaactgatttaacccaagtaatgc

SEQ ID NO: 33200 - DNA, 40 bp, Artificial Sequence
  Description of Artificial Sequence: Synthetic primer
cgtccagtctctgatcgaaggggagtttccacagtgattg

SEQ ID NO: 33201 - DNA, 40 bp, Artificial Sequence
  Description of Artificial Sequence: Synthetic primer
gctgttttgtaaaaatagcaaagcaacgaatgctgaaatc

SEQ ID NO: 33202 - DNA, 40 bp, Artificial Sequence
  Description of Artificial Sequence: Synthetic primer
ggggtgagggcaccacgcaccctccttgtgtcctctctcc

SEQ ID NO: 33203 - DNA, 40 bp, Artificial Sequence
  Description of Artificial Sequence: Synthetic primer
caggcattacggcatctatcagggacagagactctattgg

SEQ ID NO: 33204 - DNA, 40 bp, Artificial Sequence
  Description of Artificial Sequence: Synthetic primer
agctgcacggcaattaatgagtcacaacaattcagcaaag

SEQ ID NO: 33205 - DNA, 40 bp, Artificial Sequence
  Description of Artificial Sequence: Synthetic primer
tacatgctgctccgatcctcatgcagtcagaccttctcag

SEQ ID NO: 33206 - DNA, 40 bp, Artificial Sequence
  Description of Artificial Sequence: Synthetic primer
agtaagtgtttattactagccaagttgggggtggggagac

SEQ ID NO: 33207 - DNA, 40 bp, Artificial Sequence
  Description of Artificial Sequence: Synthetic primer
tgagtttttggtgtacggagacccatacttgttgatgcag

SEQ ID NO: 33208 - DNA, 40 bp, Artificial Sequence
  Description of Artificial Sequence: Synthetic primer
gttgaggcggtcccggtgtcgcttggaggggttggacttc

SEQ ID NO: 33209 - DNA, 40 bp, Artificial Sequence
  Description of Artificial Sequence: Synthetic primer
ccattagaatatcagtatccacagaaggagcaaatacttc

SEQ ID NO: 33210 - DNA, 40 bp, Artificial Sequence
  Description of Artificial Sequence: Synthetic primer
acacccagcacaaaggccgcctcaagcacagaggctccag

SEQ ID NO: 33211 - DNA, 40 bp, Artificial Sequence
  Description of Artificial Sequence: Synthetic primer
ctcgagcatacccatcatactttctctctctcatctcttc

SEQ ID NO: 33212 - DNA, 40 bp, Artificial Sequence
  Description of Artificial Sequence: Synthetic primer
ccgagcgcggaggtgccgtgcgggaccggctgctacagag

SEQ ID NO: 33213 - DNA, 40 bp, Artificial Sequence
  Description of Artificial Sequence: Synthetic primer
ccccactcatggggtctgtggccaggtagtatttgtgtgc

SEQ ID NO: 33214 - DNA, 40 bp, Artificial Sequence
  Description of Artificial Sequence: Synthetic primer
caagaaggagtcccgccagaccctcatcttctttttcaag

SEQ ID NO: 33215 - DNA, 40 bp, Artificial Sequence
  Description of Artificial Sequence: Synthetic primer
ccgagtgacacgccacagcctcttttggattttgatacag

SEQ ID NO: 33216 - DNA, 40 bp, Artificial Sequence
  Description of Artificial Sequence: Synthetic primer
gctgcctttttcgcatttcagctacttcaggacccagttg

SEQ ID NO: 33217 - DNA, 40 bp, Artificial Sequence
  Description of Artificial Sequence: Synthetic primer
tttttaaaaagataaatatctgagttaaaattactgaatc

SEQ ID NO: 33218 - DNA, 40 bp, Artificial Sequence
  Description of Artificial Sequence: Synthetic primer
tgcggaggtggctgggatccgcagggctcccctccttcag

SEQ ID NO: 33219 - DNA, 40 bp, Artificial Sequence
  Description of Artificial Sequence: Synthetic primer
acgtacgcgggccggaagcggaggaggcccctgcagaaac

SEQ ID NO: 33220 - DNA, 40 bp, Artificial Sequence
  Description of Artificial Sequence: Synthetic primer
ctggtgtggtccttgggttaattctcagccaacaattctg

SEQ ID NO: 33221 - DNA, 40 bp, Artificial Sequence
  Description of Artificial Sequence: Synthetic primer
acaaataaacataataaaaggagttcagatgtttttcttc

SEQ ID NO: 33222 - DNA, 40 bp, Artificial Sequence
  Description of Artificial Sequence: Synthetic primer
agtgtgatgtgggacatgaatgtctgtgctaacttgtctc

SEQ ID NO: 33223 - DNA, 40 bp, Artificial Sequence
  Description of Artificial Sequence: Synthetic primer
agtgttctgtgttcctcagcaaagcccagctctccagtag

SEQ ID NO: 33224 - DNA, 40 bp, Artificial Sequence
  Description of Artificial Sequence: Synthetic primer
cccattcccaccttatatttgactttaatactttttcagc

SEQ ID NO: 33225 - DNA, 40 bp, Artificial Sequence
  Description of Artificial Sequence: Synthetic primer
cgggacccctcttgctgtctttagtggaacaggtttgatg

SEQ ID NO: 33226 - DNA, 40 bp, Artificial Sequence
  Description of Artificial Sequence: Synthetic primer
ctccccgagaaattaacttcggctcaagtgaaaatagcag

SEQ ID NO: 33227 - DNA, 40 bp, Artificial Sequence
  Description of Artificial Sequence: Synthetic primer
tgaggagcgcgctcctgagggcaaaacccagagcagacac

SEQ ID NO: 33228 - DNA, 40 bp, Artificial Sequence
  Description of Artificial Sequence: Synthetic primer
ccgaggggaattccgccttctgcactatgcgggggaggtg

SEQ ID NO: 33229 - DNA, 40 bp, Artificial Sequence
  Description of Artificial Sequence: Synthetic primer
caggtccaggtcacactggactgtgtcgttctctaggatg

SEQ ID NO: 33230 - DNA, 40 bp, Artificial Sequence
  Description of Artificial Sequence: Synthetic primer
acggagggtgagtggctggaggtcatagaggagggagatg

SEQ ID NO: 33231 - DNA, 40 bp, Artificial Sequence
  Description of Artificial Sequence: Synthetic primer
ctcgctgcagatgcagtacagtattatcagttcctgcttg

SEQ ID NO: 33232 - DNA, 40 bp, Artificial Sequence
  Description of Artificial Sequence: Synthetic primer
cattctaagatttcacattgaaatcttagattccatttgc

SEQ ID NO: 33233 - DNA, 40 bp, Artificial Sequence
  Description of Artificial Sequence: Synthetic primer
ctgcactccaggggccccagttttcctttttcaacttcag

SEQ ID NO: 33234 - DNA, 40 bp, Artificial Sequence
  Description of Artificial Sequence: Synthetic primer
gtcccgacggcgcctccccagcccggggacggccgtgctc

SEQ ID NO: 33235 - DNA, 40 bp, Artificial Sequence
  Description of Artificial Sequence: Synthetic primer
gagctggacaaacagtcggaaaatgcgccacggcccacag

SEQ ID NO: 33236 - DNA, 40 bp, Artificial Sequence
  Description of Artificial Sequence: Synthetic primer
atccccgaggaggaagacgaatcgttaaacatcttaggtc

SEQ ID NO: 33237 - DNA, 40 bp, Artificial Sequence
  Description of Artificial Sequence: Synthetic primer
gtggctggaagaaaatcctgaatttgcagttgctccagac

SEQ ID NO: 33238 - DNA, 40 bp, Artificial Sequence
  Description of Artificial Sequence: Synthetic primer
ctgctggagctccagcactcctctggtcgtctgttgacac

SEQ ID NO: 33239 - DNA, 40 bp, Artificial Sequence
  Description of Artificial Sequence: Synthetic primer
cactgaggaaaatgcagggcatcttggatcctcggccaac

SEQ ID NO: 33240 - DNA, 40 bp, Artificial Sequence
  Description of Artificial Sequence: Synthetic primer
tgcgcaccctgatgttctccttcaggcccaggtattccac

SEQ ID NO: 33241 - DNA, 40 bp, Artificial Sequence
  Description of Artificial Sequence: Synthetic primer
ggacataaagtgagttgtccattgggttgatggctaagtc

SEQ ID NO: 33242 - DNA, 40 bp, Artificial Sequence
  Description of Artificial Sequence: Synthetic primer
aagaacatatatttttcttcatggaacataactttctaag

SEQ ID NO: 33243 - DNA, 40 bp, Artificial Sequence
  Description of Artificial Sequence: Synthetic primer
caggctgctcccagaggtggggaacccttcataggaaatc

SEQ ID NO: 33244 - DNA, 40 bp, Artificial Sequence
  Description of Artificial Sequence: Synthetic primer
ggagcccgtgggcttcctggtgagagaggacgtgttggtg

SEQ ID NO: 33245 - DNA, 40 bp, Artificial Sequence
  Description of Artificial Sequence: Synthetic primer
gtcttgccatgtcaaggcctttcccatcccctatttcctg

SEQ ID NO: 33246 - DNA, 40 bp, Artificial Sequence
  Description of Artificial Sequence: Synthetic primer
acccaggccgtctccagctccaaacacgtcaatggctcac

SEQ ID NO: 33247 - DNA, 40 bp, Artificial Sequence
  Description of Artificial Sequence: Synthetic primer
cgagtcgatattcctcactccaacagcaaacactttgacc

SEQ ID NO: 33248 - DNA, 40 bp, Artificial Sequence
  Description of Artificial Sequence: Synthetic primer
ccccccgccatacgtagatgtctagccctcggtccagcag

SEQ ID NO: 33249 - DNA, 40 bp, Artificial Sequence
  Description of Artificial Sequence: Synthetic primer
tttccccaggtttattaaatttcgcagcccaggattgaac

SEQ ID NO: 33250 - DNA, 40 bp, Artificial Sequence
  Description of Artificial Sequence: Synthetic primer
gtgtcccgagctttgcccggaacacagtggcctcctcctc

SEQ ID NO: 33251 - DNA, 40 bp, Artificial Sequence
  Description of Artificial Sequence: Synthetic primer
gatggacattctcggcgcctcccgccatgatggggcttac

SEQ ID NO: 33252 - DNA, 40 bp, Artificial Sequence
  Description of Artificial Sequence: Synthetic primer
ttcatcactcttccttaagcacttctaaggtgtacaatcc

SEQ ID NO: 33253 - DNA, 40 bp, Artificial Sequence
  Description of Artificial Sequence: Synthetic primer
atgcaaactcatgccacaacacagccaacagcaacatacc

SEQ ID NO: 33254 - DNA, 40 bp, Artificial Sequence
  Description of Artificial Sequence: Synthetic primer
ctgaatttctaaaatcattctgtcaatctcatcttgttgg

SEQ ID NO: 33255 - DNA, 40 bp, Artificial Sequence
  Description of Artificial Sequence: Synthetic primer
ctgacatggagacctgtaggaatggaggaagattcatcag

SEQ ID NO: 33256 - DNA, 40 bp, Artificial Sequence
  Description of Artificial Sequence: Synthetic primer
ggccacgctgcgagagtggctggagcagcacaaggacaag

SEQ ID NO: 33257 - DNA, 40 bp, Artificial Sequence
  Description of Artificial Sequence: Synthetic primer
gatttggaagaaggtctcttcatttctggccactttcgac

SEQ ID NO: 33258 - DNA, 40 bp, Artificial Sequence
  Description of Artificial Sequence: Synthetic primer
caattttaaaggatatgagaaagccaagactcaagagatg

SEQ ID NO: 33259 - DNA, 40 bp, Artificial Sequence
  Description of Artificial Sequence: Synthetic primer
tcttcatgaacagcagaagctcctctcccggcgcaatgtc

SEQ ID NO: 33260 - DNA, 40 bp, Artificial Sequence
  Description of Artificial Sequence: Synthetic primer
taaaatttgtatgacttcaagtctcattttatctgaaagg

SEQ ID NO: 33261 - DNA, 40 bp, Artificial Sequence
  Description of Artificial Sequence: Synthetic primer
cagtgtctgaaagtgaactgccatgtgaagtctggctacc

SEQ ID NO: 33262 - DNA, 40 bp, Artificial Sequence
  Description of Artificial Sequence: Synthetic primer
ctactccaatgaagtccattgtgttgaagagattctgaag

SEQ ID NO: 33263 - DNA, 40 bp, Artificial Sequence
  Description of Artificial Sequence: Synthetic primer
tcgatgagatccataaaaagcacatcccggttcctttcac

SEQ ID NO: 33264 - DNA, 40 bp, Artificial Sequence
  Description of Artificial Sequence: Synthetic primer
agaaaatccttgtcttcccttaaatctatagcttccaaaa

SEQ ID NO: 33265 - DNA, 40 bp, Artificial Sequence
  Description of Artificial Sequence: Synthetic primer
aaggagctccctatgggtttttagcacaaaactgcacaac

SEQ ID NO: 33266 - DNA, 40 bp, Artificial Sequence
  Description of Artificial Sequence: Synthetic primer
caacaaaaatcacataatctaagagaaaacaatgtagtcc

SEQ ID NO: 33267 - DNA, 40 bp, Artificial Sequence
  Description of Artificial Sequence: Synthetic primer
aggaattggtcctaaaaggacagatcacttcagaagagtg

SEQ ID NO: 33268 - DNA, 40 bp, Artificial Sequence
  Description of Artificial Sequence: Synthetic primer
gtaaaaaataaatttgtaataaaatgtgtgactatgaaac

SEQ ID NO: 33269 - DNA, 40 bp, Artificial Sequence
  Description of Artificial Sequence: Synthetic primer
aatttttgattcctcctaaagatgaagactctcctaaatc

SEQ ID NO: 33270 - DNA, 40 bp, Artificial Sequence
  Description of Artificial Sequence: Synthetic primer
ggtgtagcaaactctaagcccagccactcattttacatgg

SEQ ID NO: 33271 - DNA, 40 bp, Artificial Sequence
  Description of Artificial Sequence: Synthetic primer
atagacagccaacaagatgagattgacagaatgattttag

SEQ ID NO: 33272 - DNA, 40 bp, Artificial Sequence
  Description of Artificial Sequence: Synthetic primer
gcgatctaccatcagtgaaatatcatcgaccctttttatg

SEQ ID NO: 33273 - DNA, 40 bp, Artificial Sequence
  Description of Artificial Sequence: Synthetic primer
attaatcactttattatgaatgaatgaatgaatttgatgg

SEQ ID NO: 33274 - DNA, 40 bp, Artificial Sequence
  Description of Artificial Sequence: Synthetic primer
attctttcagaatgtcttgcacagtttcatatttcttcag

SEQ ID NO: 33275 - DNA, 40 bp, Artificial Sequence
  Description of Artificial Sequence: Synthetic primer
ttaatgtagtcagcaagttcaggaatggaagtaatgtcac

SEQ ID NO: 33276 - DNA, 40 bp, Artificial Sequence
  Description of Artificial Sequence: Synthetic primer
acaaattcatatttgcatccttgaagctcacagaaaaacg

SEQ ID NO: 33277 - DNA, 40 bp, Artificial Sequence
  Description of Artificial Sequence: Synthetic primer
cctacccccaccccacccatcccagtactgttgaatgctc

SEQ ID NO: 33278 - DNA, 40 bp, Artificial Sequence
  Description of Artificial Sequence: Synthetic primer
cccatgatatatttggctgccactgtcttcccagctccac

SEQ ID NO: 33279 - DNA, 40 bp, Artificial Sequence
  Description of Artificial Sequence: Synthetic primer
aaaaaagaaaagcaaggaggagggttgagcaatctagagc

SEQ ID NO: 33280 - DNA, 40 bp, Artificial Sequence
  Description of Artificial Sequence: Synthetic primer
gtttcaacattccgtgttcgtactcccttttgtatgtttc

SEQ ID NO: 33281 - DNA, 40 bp, Artificial Sequence
  Description of Artificial Sequence: Synthetic primer
attggcgtcattggcaaggatcacacccgtgttcttcatc

SEQ ID NO: 33282 - DNA, 40 bp, Artificial Sequence
  Description of Artificial Sequence: Synthetic primer
tctctcacactcagtttttggttctacccctttacaatag

SEQ ID NO: 33283 - DNA, 40 bp, Artificial Sequence
  Description of Artificial Sequence: Synthetic primer
tctccctcaaagcccggctggccaggaccgcccttgttgc

SEQ ID NO: 33284 - DNA, 40 bp, Artificial Sequence
  Description of Artificial Sequence: Synthetic primer
gaaaacaaagaaaaacatactccagaattcctaatagaac

SEQ ID NO: 33285 - DNA, 40 bp, Artificial Sequence
  Description of Artificial Sequence: Synthetic primer
tacatataatttcttttaaatcatgtgtctcacaattcag

SEQ ID NO: 33286 - DNA, 40 bp, Artificial Sequence
  Description of Artificial Sequence: Synthetic primer
ctctttactgaagataaaggtgtagtaaaagctcccacac

SEQ ID NO: 33287 - DNA, 40 bp, Artificial Sequence
  Description of Artificial Sequence: Synthetic primer
gctggcaaaccgttttgggaaacttgttctccttttgaag

SEQ ID NO: 33288 - DNA, 40 bp, Artificial Sequence
  Description of Artificial Sequence: Synthetic primer
caagagctagagcgattaagaagcgaaaataaggatattg

SEQ ID NO: 33289 - DNA, 40 bp, Artificial Sequence
  Description of Artificial Sequence: Synthetic primer
gtgtttcggatttttgacaatatgaaactccctgagcaac

SEQ ID NO: 33290 - DNA, 40 bp, Artificial Sequence
  Description of Artificial Sequence: Synthetic primer
ggcaaagctactgcagaggagaaactcagtcagagaatcc

SEQ ID NO: 33291 - DNA, 40 bp, Artificial Sequence
  Description of Artificial Sequence: Synthetic primer
ccctctctgctcagccacagctttccagaagccactcctc

SEQ ID NO: 33292 - DNA, 40 bp, Artificial Sequence
  Description of Artificial Sequence: Synthetic primer
aaggagcttgcccagacttaatagcgttactctgcttctc

SEQ ID NO: 33293 - DNA, 40 bp, Artificial Sequence
  Description of Artificial Sequence: Synthetic primer
gagtggagaaggcacagactacatcaatgcctcctatatc

SEQ ID NO: 33294 - DNA, 40 bp, Artificial Sequence
  Description of Artificial Sequence: Synthetic primer
atgccggcagcagctagcaaagccagaaagcaagtctaac

SEQ ID NO: 33295 - DNA, 40 bp, Artificial Sequence
  Description of Artificial Sequence: Synthetic primer
aggggctgcttgtctgggagggagggagagaacattcagc

SEQ ID NO: 33296 - DNA, 40 bp, Artificial Sequence
  Description of Artificial Sequence: Synthetic primer
ccacagttcattcgaggatcttcataagtgttgctaggtc

SEQ ID NO: 33297 - DNA, 40 bp, Artificial Sequence
  Description of Artificial Sequence: Synthetic primer
ttagtccatattctggcaaacccatcataggaaccagttg

SEQ ID NO: 33298 - DNA, 40 bp, Artificial Sequence
  Description of Artificial Sequence: Synthetic primer
cctgggaacactggacctgctccttctcccctctccttcc

SEQ ID NO: 33299 - DNA, 40 bp, Artificial Sequence
  Description of Artificial Sequence: Synthetic primer
taccaaaaaatgcaacaagcttttgaggtgttgggaattg

SEQ ID NO: 33300 - DNA, 40 bp, Artificial Sequence
  Description of Artificial Sequence: Synthetic primer
tttcattaacaaaattgatacaaaactgttcaaagccatt

SEQ ID NO: 33301 - DNA, 40 bp, Artificial Sequence
  Description of Artificial Sequence: Synthetic primer
tctctcacccgccgagcccgtcccccagtgcctactccag

SEQ ID NO: 33302 - DNA, 40 bp, Artificial Sequence
  Description of Artificial Sequence: Synthetic primer
gccttaaatttcacccagttcaggatactttctacaatgc

SEQ ID NO: 33303 - DNA, 40 bp, Artificial Sequence
  Description of Artificial Sequence: Synthetic primer
gcacggtgcctcaggaaggtggcgactcaggtgggccttg

SEQ ID NO: 33304 - DNA, 40 bp, Artificial Sequence
  Description of Artificial Sequence: Synthetic primer
gagagaaaaccaaggtgtgtcaaatgacgtcaagtctcta

SEQ ID NO: 33305 - DNA, 40 bp, Artificial Sequence
  Description of Artificial Sequence: Synthetic primer
gtggtccaccaacagctgtggagcacaaggggcttgtagg

SEQ ID NO: 33306 - DNA, 40 bp, Artificial Sequence
  Description of Artificial Sequence: Synthetic primer
tgttcagccagccactgaaaatcccaaagtacaacacaag

SEQ ID NO: 33307 - DNA, 40 bp, Artificial Sequence
  Description of Artificial Sequence: Synthetic primer
ggggaacttggccattaggttattatttgagaggaaagtc

SEQ ID NO: 33308 - DNA, 40 bp, Artificial Sequence
  Description of Artificial Sequence: Synthetic primer
aagtctggctggaggtccaggagatcactagatggtttag

SEQ ID NO: 33309 - DNA, 40 bp, Artificial Sequence
  Description of Artificial Sequence: Synthetic primer
ccagttctcgcttcagcacgatgtctctcctcttaatgtg

SEQ ID NO: 33310 - DNA, 40 bp, Artificial Sequence
  Description of Artificial Sequence: Synthetic primer
ggtaagatgctgcctcccaatgggtgatgccatctgactg

SEQ ID NO: 33311 - DNA, 40 bp, Artificial Sequence
  Description of Artificial Sequence: Synthetic primer
cgtctttggcttggaagaggtactcattgccatcatttag

SEQ ID NO: 33312 - DNA, 40 bp, Artificial Sequence
  Description of Artificial Sequence: Synthetic primer
ctttacatgcaatagctaattatggtctaccacagaaaac

SEQ ID NO: 33313 - DNA, 40 bp, Artificial Sequence
  Description of Artificial Sequence: Synthetic primer
ctcagaatggaaagtgggctttataatagggtgtggagtg

SEQ ID NO: 33314 - DNA, 40 bp, Artificial Sequence
  Description of Artificial Sequence: Synthetic primer
catgtcaaatttgttggcgggggcagcctgcctcgtcatg

SEQ ID NO: 33315 - DNA, 40 bp, Artificial Sequence
  Description of Artificial Sequence: Synthetic primer
ctgcctccaccccacccccgactactcctctttgtccttc

SEQ ID NO: 33316 - DNA, 40 bp, Artificial Sequence
  Description of Artificial Sequence: Synthetic primer
tgtgggtcacagtgataggaggtgtgggactcacttcgtc

SEQ ID NO: 33317 - DNA, 40 bp, Artificial Sequence
  Description of Artificial Sequence: Synthetic primer
gttcgtccccacgccaccgcggccacgtctcgggggtcag

SEQ ID NO: 33318 - DNA, 40 bp, Artificial Sequence
  Description of Artificial Sequence: Synthetic primer
cagtatcgccggtcatacaccctccggtcggacgaacgat

SEQ ID NO: 33319 - DNA, 40 bp, Artificial Sequence
  Description of Artificial Sequence: Synthetic primer
atccacattggatcctcatttgagaagtacccactctatg

SEQ ID NO: 33320 - DNA, 40 bp, Artificial Sequence
  Description of Artificial Sequence: Synthetic primer
agcatcttgaaagtggtgccaggtgattggtttcctgttc

SEQ ID NO: 33321 - DNA, 40 bp, Artificial Sequence
  Description of Artificial Sequence: Synthetic primer
tacacgtgtccgtacaagtataactaaataaaaattaaag

SEQ ID NO: 33322 - DNA, 40 bp, Artificial Sequence
  Description of Artificial Sequence: Synthetic primer
acaactgttactgctgtcactgctgaagtggatctctttg

SEQ ID NO: 33323 - DNA, 40 bp, Artificial Sequence
  Description of Artificial Sequence: Synthetic primer
gctgaagagctgcttcaccaaggattatgaagagcatgac

SEQ ID NO: 33324 - DNA, 40 bp, Artificial Sequence
  Description of Artificial Sequence: Synthetic primer
ggattttggaaatctcttctcatttccttcatattctcag

SEQ ID NO: 33325 - DNA, 40 bp, Artificial Sequence
  Description of Artificial Sequence: Synthetic primer
cggggaccggcgggaccagcaggaccagcgttaccaacag

SEQ ID NO: 33326 - DNA, 40 bp, Artificial Sequence
  Description of Artificial Sequence: Synthetic primer
ctgcccattctctgtctgttagtctgtgatcaatcatttc

SEQ ID NO: 33327 - DNA, 40 bp, Artificial Sequence
  Description of Artificial Sequence: Synthetic primer
tttggtacatgtaaaccttagctgttctagcattattctg

SEQ ID NO: 33328 - DNA, 40 bp, Artificial Sequence
  Description of Artificial Sequence: Synthetic primer
ccccgctcgcgcgtcttcctagtcaccctctgtcttctgc

SEQ ID NO: 33329 - DNA, 40 bp, Artificial Sequence
  Description of Artificial Sequence: Synthetic primer
caacacatctttattaaacacctgaagttactgggaggag

SEQ ID NO: 33330 - DNA, 40 bp, Artificial Sequence
  Description of Artificial Sequence: Synthetic primer
ctgagtgccgcactgtccgggaggagatgggcgatgagag

SEQ ID NO: 33331 - DNA, 40 bp, Artificial Sequence
  Description of Artificial Sequence: Synthetic primer
agatttgtattctaaataggctccagggaccaacctcacc

SEQ ID NO: 33332 - DNA, 40 bp, Artificial Sequence
  Description of Artificial Sequence: Synthetic primer
aagccacaatttagattgcccttcggtgtgctccagattg

SEQ ID NO: 33333 - DNA, 40 bp, Artificial Sequence
  Description of Artificial Sequence: Synthetic primer
cagacgaacctgagagaatcgggggacctgaggtcacaag

SEQ ID NO: 33334 - DNA, 40 bp, Artificial Sequence
  Description of Artificial Sequence: Synthetic primer
cgtcccacgagctcacagagctatgaacagaatatcaaac

SEQ ID NO: 33335 - DNA, 40 bp, Artificial Sequence
  Description of Artificial Sequence: Synthetic primer
tccaccctcttgggggctgcgtcggtggcaggggcagtgg

SEQ ID NO: 33336 - DNA, 40 bp, Artificial Sequence
  Description of Artificial Sequence: Synthetic primer
caaagtcccagccacatatggtcagccttgtccctccttc

SEQ ID NO: 33337 - DNA, 40 bp, Artificial Sequence
  Description of Artificial Sequence: Synthetic primer
cgctccctgtgcaagctgtccatgaaaccccttggtgaag

SEQ ID NO: 33338 - DNA, 40 bp, Artificial Sequence
  Description of Artificial Sequence: Synthetic primer
agaaaacttttcttttttattatatattttagtgtaagtt

SEQ ID NO: 33339 - DNA, 40 bp, Artificial Sequence
  Description of Artificial Sequence: Synthetic primer
agcatcttcagttaccgtgaagatcccattgtctatgaaa

SEQ ID NO: 33340 - DNA, 40 bp, Artificial Sequence
  Description of Artificial Sequence: Synthetic primer
ttcatgtaattaactgaatttaaaaccttcaactattatg

SEQ ID NO: 33341 - DNA, 40 bp, Artificial Sequence
  Description of Artificial Sequence: Synthetic primer
gtctgactggcgggtggtggtggaggagcggatcagaagc

SEQ ID NO: 33342 - DNA, 40 bp, Artificial Sequence
  Description of Artificial Sequence: Synthetic primer
ctgtgtgaggtcaggaatgtcacctttatcaataccaact

SEQ ID NO: 33343 - DNA, 40 bp, Artificial Sequence
  Description of Artificial Sequence: Synthetic primer
tccatcaataatcgctttgaaatccaaattttcttctgtc

SEQ ID NO: 33344 - DNA, 40 bp, Artificial Sequence
  Description of Artificial Sequence: Synthetic primer
gacttcaggacacgaccacccggacgtggccaccatgctc

SEQ ID NO: 33345 - DNA, 40 bp, Artificial Sequence
  Description of Artificial Sequence: Synthetic primer
cttataataattctcaagcaccatcgcctggcttgggaag

SEQ ID NO: 33346 - DNA, 40 bp, Artificial Sequence
  Description of Artificial Sequence: Synthetic primer
ttggagctgctgagcttgtatccacacagccatggtttac

SEQ ID NO: 33347 - DNA, 40 bp, Artificial Sequence
  Description of Artificial Sequence: Synthetic primer
gccctgacttttatctgtctagtggttcttgtgggtattc

SEQ ID NO: 33348 - DNA, 40 bp, Artificial Sequence
  Description of Artificial Sequence: Synthetic primer
cacagacgcacactcactcgacacactctcgctcctgctc

SEQ ID NO: 33349 - DNA, 40 bp, Artificial Sequence
  Description of Artificial Sequence: Synthetic primer
ggtcctgggtggaaaatcccaggacgatgtgtccaggttc

SEQ ID NO: 33350 - DNA, 40 bp, Artificial Sequence
  Description of Artificial Sequence: Synthetic primer
ctttcatggaatgttacacagctgactttaggttttaatc

SEQ ID NO: 33351 - DNA, 40 bp, Artificial Sequence
  Description of Artificial Sequence: Synthetic primer
ggacccacgggacccacacttccatcactgccacgggcac

SEQ ID NO: 33352 - DNA, 40 bp, Artificial Sequence
  Description of Artificial Sequence: Synthetic primer
catcggtactggaggccactgcactggatgtttgggcaag

SEQ ID NO: 33353 - DNA, 40 bp, Artificial Sequence
  Description of Artificial Sequence: Synthetic primer
tattgctgtctattggagcagcatcgtggcacatcagcag

SEQ ID NO: 33354 - DNA, 40 bp, Artificial Sequence
  Description of Artificial Sequence: Synthetic primer
ctgatggatcagagcatagtttagaaggacaaaaatttcc

SEQ ID NO: 33355 - DNA, 40 bp, Artificial Sequence
  Description of Artificial Sequence: Synthetic primer
tcatgactacggagacactgaagaaaattcagattgatag

SEQ ID NO: 33356 - DNA, 40 bp, Artificial Sequence
  Description of Artificial Sequence: Synthetic primer
atcactggtatgccagcctcaactgaaggagcatatgtgt

SEQ ID NO: 33357 - DNA, 40 bp, Artificial Sequence
  Description of Artificial Sequence: Synthetic primer
gtgagtcttctcaatgcttgcaaactgaatagatcgacac

SEQ ID NO: 33358 - DNA, 40 bp, Artificial Sequence
  Description of Artificial Sequence: Synthetic primer
gacatctgtaatgttgcatatctgttcatattaataactt

SEQ ID NO: 33359 - DNA, 40 bp, Artificial Sequence
  Description of Artificial Sequence: Synthetic primer
gctagtcgactggctcagcaaggaagtgatttaattgttc

SEQ ID NO: 33360 - DNA, 40 bp, Artificial Sequence
  Description of Artificial Sequence: Synthetic primer
cgctgcttggacatactggaagactacctcattcaaagac

SEQ ID NO: 33361 - DNA, 40 bp, Artificial Sequence
  Description of Artificial Sequence: Synthetic primer
taccttgaaggatatgtggcaaacctgaaccgtgatgatg

SEQ ID NO: 33362 - DNA, 40 bp, Artificial Sequence
  Description of Artificial Sequence: Synthetic primer
agcccaccaaaacggagagggaaagaaagtggagagacag

SEQ ID NO: 33363 - DNA, 40 bp, Artificial Sequence
  Description of Artificial Sequence: Synthetic primer
ttttccaacgttggctgatccatccaaaagaaagatgata

SEQ ID NO: 33364 - DNA, 40 bp, Artificial Sequence
  Description of Artificial Sequence: Synthetic primer
ggggggttggctaaaacatcatagccactttcatcatctg

SEQ ID NO: 33365 - DNA, 40 bp, Artificial Sequence
  Description of Artificial Sequence: Synthetic primer
gagagagctctggcttcaccgagtgccggggctacttcac

SEQ ID NO: 33366 - DNA, 40 bp, Artificial Sequence
  Description of Artificial Sequence: Synthetic primer
attccttctggcatttctttttcagactactgatgtatcg

SEQ ID NO: 33367 - DNA, 40 bp, Artificial Sequence
  Description of Artificial Sequence: Synthetic primer
actaaatgatggcaatgagtacctcttccaagccaaagac

SEQ ID NO: 33368 - DNA, 40 bp, Artificial Sequence
  Description of Artificial Sequence: Synthetic primer
ggtgacaccattactggagattcaagtggcaacatcttag

SEQ ID NO: 33369 - DNA, 40 bp, Artificial Sequence
  Description of Artificial Sequence: Synthetic primer
gcattttctaagctgaaggagaagtttatgaatgagttgc

SEQ ID NO: 33370 - DNA, 40 bp, Artificial Sequence
  Description of Artificial Sequence: Synthetic primer
tgatgacggagcccaggaggtggtgaaggacatcttggaa

SEQ ID NO: 33371 - DNA, 40 bp, Artificial Sequence
  Description of Artificial Sequence: Synthetic primer
ctggctgcacttcctcttctgggctgtcgttgtattggag

SEQ ID NO: 33372 - DNA, 40 bp, Artificial Sequence
  Description of Artificial Sequence: Synthetic primer
caaaaaactggaagaggaaatccagacccttcgagtttac

SEQ ID NO: 33373 - DNA, 40 bp, Artificial Sequence
  Description of Artificial Sequence: Synthetic primer
tgactcgagggtttgcacatggcctgatagtcatacatag

SEQ ID NO: 33374 - DNA, 40 bp, Artificial Sequence
  Description of Artificial Sequence: Synthetic primer
gtattccatcacgttctcctgggtgtccgccagcgttgag

SEQ ID NO: 33375 - DNA, 40 bp, Artificial Sequence
  Description of Artificial Sequence: Synthetic primer
ccccacacctttgaccatcaactcctccaccagcagtttg

SEQ ID NO: 33376 - DNA, 40 bp, Artificial Sequence
  Description of Artificial Sequence: Synthetic primer
tctggtttgggttctgtttgtttttcctaaggctggctac

SEQ ID NO: 33377 - DNA, 40 bp, Artificial Sequence
  Description of Artificial Sequence: Synthetic primer
tcatttcttggagcggaaactatcaaaaacttcgtaaaac

SEQ ID NO: 33378 - DNA, 40 bp, Artificial Sequence
  Description of Artificial Sequence: Synthetic primer
aatgtgaacaaacatagaagtcactggaaatcacaacagt

SEQ ID NO: 33379 - DNA, 40 bp, Artificial Sequence
  Description of Artificial Sequence: Synthetic primer
tacagttctgtaatggcgaattaagccttttagattggtg

SEQ ID NO: 33380 - DNA, 40 bp, Artificial Sequence
  Description of Artificial Sequence: Synthetic primer
gcgtatgacgcagcagccaaagcagcggcagcggcaggag

SEQ ID NO: 33381 - DNA, 40 bp, Artificial Sequence
  Description of Artificial Sequence: Synthetic primer
gggagggtccagtgggcgcctttatcaccgagaattcagc

SEQ ID NO: 33382 - DNA, 40 bp, Artificial Sequence
  Description of Artificial Sequence: Synthetic primer
tgtcctagcgtattcaattattatgctgactacagacttg

SEQ ID NO: 33383 - DNA, 40 bp, Artificial Sequence
  Description of Artificial Sequence: Synthetic primer
cgcaggagaccaacgcctgccatgctgttccggctctcag

SEQ ID NO: 33384 - DNA, 40 bp, Artificial Sequence
  Description of Artificial Sequence: Synthetic primer
gccccggacctcccagactccactcacccattccctctcc

SEQ ID NO: 33385 - DNA, 40 bp, Artificial Sequence
  Description of Artificial Sequence: Synthetic primer
ggattttttgtaaattaaatcaatgcattatgattttagg

SEQ ID NO: 33386 - DNA, 40 bp, Artificial Sequence
  Description of Artificial Sequence: Synthetic primer
tgctttcaatcagatcgaagagctggtggtgttcctctgc

SEQ ID NO: 33387 - DNA, 40 bp, Artificial Sequence
  Description of Artificial Sequence: Synthetic primer
atgccttctctactgtgcatacccatgaaatttaatacac

SEQ ID NO: 33388 - DNA, 40 bp, Artificial Sequence
  Description of Artificial Sequence: Synthetic primer
ttaagctataagtctctgtcatttttgcttgaaaattagc

SEQ ID NO: 33389 - DNA, 40 bp, Artificial Sequence
  Description of Artificial Sequence: Synthetic primer
gcggcgccagggctggtgcccatacttccttgctcgatac

SEQ ID NO: 33390 - DNA, 40 bp, Artificial Sequence
  Description of Artificial Sequence: Synthetic primer
tggctgtggccatgggcaaggccctgctggaattcgtgtg

SEQ ID NO: 33391 - DNA, 40 bp, Artificial Sequence
  Description of Artificial Sequence: Synthetic primer
ttagtgccactactgctacctgcgctggtccgctggctac

SEQ ID NO: 33392 - DNA, 40 bp, Artificial Sequence
  Description of Artificial Sequence: Synthetic primer
acaagtttaaataggacaagcatatatactcactctcagc

SEQ ID NO: 33393 - DNA, 40 bp, Artificial Sequence
  Description of Artificial Sequence: Synthetic primer
ttgttacagctagagtgtgaaaaatacaaatccgtccttg

SEQ ID NO: 33394 - DNA, 40 bp, Artificial Sequence
  Description of Artificial Sequence: Synthetic primer
atcaaccaacttaatctggttgaacgtgctgttcctaatc

SEQ ID NO: 33395 - DNA, 40 bp, Artificial Sequence
  Description of Artificial Sequence: Synthetic primer
aggagcaaaaagcacagaatcaaatgacgacacgttccac

SEQ ID NO: 33396 - DNA, 40 bp, Artificial Sequence
  Description of Artificial Sequence: Synthetic primer
gagtccgagagagatggaggctctgaggaccaagtggaag

SEQ ID NO: 33397 - DNA, 40 bp, Artificial Sequence
  Description of Artificial Sequence: Synthetic primer
ttaattctgattttaaaccccattcaacagcaaaacgatg

SEQ ID NO: 33398 - DNA, 40 bp, Artificial Sequence
  Description of Artificial Sequence: Synthetic primer
gtgtggaaaaacccagttcttcttaaaattctgtctcaac

SEQ ID NO: 33399 - DNA, 40 bp, Artificial Sequence
  Description of Artificial Sequence: Synthetic primer
cgtcacggtggcgtaggggtcacattgcccattcacgatg

SEQ ID NO: 33400 - DNA, 40 bp, Artificial Sequence
  Description of Artificial Sequence: Synthetic primer
atggaggacagcaatttctccccttggaacacctctagtc

SEQ ID NO: 33401 - DNA, 40 bp, Artificial Sequence
  Description of Artificial Sequence: Synthetic primer
attcttcaatgagcagaaatatgctgatgcggtgaagaac

SEQ ID NO: 33402 - DNA, 40 bp, Artificial Sequence
  Description of Artificial Sequence: Synthetic primer
aaaagcaaaggtgttttgacaaacaggtgtatgcatttat

SEQ ID NO: 33403 - DNA, 40 bp, Artificial Sequence
  Description of Artificial Sequence: Synthetic primer
actctccgcagcctcagccagcagagtggcgctaaacctg

SEQ ID NO: 33404 - DNA, 40 bp, Artificial Sequence
  Description of Artificial Sequence: Synthetic primer
tttgtcagtcaaaatttgggacttaaatatggaaaacagg

SEQ ID NO: 33405 - DNA, 40 bp, Artificial Sequence
  Description of Artificial Sequence: Synthetic primer
taaaactggaattcctgtcgttactgtttccttatcaaag

SEQ ID NO: 33406 - DNA, 40 bp, Artificial Sequence
  Description of Artificial Sequence: Synthetic primer
acaagtacaatatcatctcatgccaagtaatatacacaag

SEQ ID NO: 33407 - DNA, 40 bp, Artificial Sequence
  Description of Artificial Sequence: Synthetic primer
gaggcagagttcaggcttcaccgaatgcaggccctatttc

SEQ ID NO: 33408 - DNA, 40 bp, Artificial Sequence
  Description of Artificial Sequence: Synthetic primer
gaatcttccctggtaagaggtcatcttcaggatttagcag

SEQ ID NO: 33409 - DNA, 40 bp, Artificial Sequence
  Description of Artificial Sequence: Synthetic primer
ccaaggcgggcagttcggcagcctgaatgatccctaccag

SEQ ID NO: 33410 - DNA, 40 bp, Artificial Sequence
  Description of Artificial Sequence: Synthetic primer
cactctgctggctgaggctgcggagagtgtgcggctccag

SEQ ID NO: 33411 - DNA, 40 bp, Artificial Sequence
  Description of Artificial Sequence: Synthetic primer
atatggggacaccgtgtacaccattgaagttccctttcac

SEQ ID NO: 33412 - DNA, 40 bp, Artificial Sequence
  Description of Artificial Sequence: Synthetic primer
caccaagagcgacctgcctgtccacacccgcaccctgaag

SEQ ID NO: 33413 - DNA, 40 bp, Artificial Sequence
  Description of Artificial Sequence: Synthetic primer
tcaagaggttttcagccttttcttactaactgagagattc

SEQ ID NO: 33414 - DNA, 40 bp, Artificial Sequence
  Description of Artificial Sequence: Synthetic primer
aatccttttgaacacgttcgacaaaagcagtggagaagag

SEQ ID NO: 33415 - DNA, 40 bp, Artificial Sequence
  Description of Artificial Sequence: Synthetic primer
tttttttccttggaaacaaatggactgggaagaaacacag

SEQ ID NO: 33416 - DNA, 40 bp, Artificial Sequence
  Description of Artificial Sequence: Synthetic primer
aatgcgaatcctaaagcgtttcctcgcttgcattcagctc

SEQ ID NO: 33417 - DNA, 40 bp, Artificial Sequence
  Description of Artificial Sequence: Synthetic primer
ggcgccccttcttgtctccatccagcttctcggggaagag

SEQ ID NO: 33418 - DNA, 40 bp, Artificial Sequence
  Description of Artificial Sequence: Synthetic primer
tgtgttatattttgaataaataccacaaaccattccattg

SEQ ID NO: 33419 - DNA, 40 bp, Artificial Sequence
  Description of Artificial Sequence: Synthetic primer
acatttatgcaagaatttggtgatctaaaaacagaagagc

SEQ ID NO: 33420 - DNA, 40 bp, Artificial Sequence
  Description of Artificial Sequence: Synthetic primer
gaccgggctcaggcgaggtcccagctcacagcccccaagc

SEQ ID NO: 33421 - DNA, 40 bp, Artificial Sequence
  Description of Artificial Sequence: Synthetic primer
actgtgttataatttgcttcatttccttgctatttgatac

SEQ ID NO: 33422 - DNA, 40 bp, Artificial Sequence
  Description of Artificial Sequence: Synthetic primer
ctctcagaattcacagtgatgaaataggcaagagcttcac

SEQ ID NO: 33423 - DNA, 40 bp, Artificial Sequence
  Description of Artificial Sequence: Synthetic primer
gtggtcgcagggtcccatgaactgggacaggactatgagc

SEQ ID NO: 33424 - DNA, 40 bp, Artificial Sequence
  Description of Artificial Sequence: Synthetic primer
cgaaatggataaggccttcttgacaaatttctgccacctc

SEQ ID NO: 33425 - DNA, 40 bp, Artificial Sequence
  Description of Artificial Sequence: Synthetic primer
cgcggggagagcactggggaccgagacccggcaccacctc

SEQ ID NO: 33426 - DNA, 40 bp, Artificial Sequence
  Description of Artificial Sequence: Synthetic primer
ttaactttcttggattatagctgttttagagtcaaaagtc

SEQ ID NO: 33427 - DNA, 40 bp, Artificial Sequence
  Description of Artificial Sequence: Synthetic primer
acccagagacaataacatatgatgtccttataccagaatc

SEQ ID NO: 33428 - DNA, 40 bp, Artificial Sequence
  Description of Artificial Sequence: Synthetic primer
acgccagtggcacttgggacttctatggcagctctgtttg

SEQ ID NO: 33429 - DNA, 40 bp, Artificial Sequence
  Description of Artificial Sequence: Synthetic primer
aaagggcagggcgtcgtggccgttaaacttctgcatgacc

SEQ ID NO: 33430 - DNA, 40 bp, Artificial Sequence
  Description of Artificial Sequence: Synthetic primer
tggggtcatctccaaggatccagccgtgaagactaacaag

SEQ ID NO: 33431 - DNA, 40 bp, Artificial Sequence
  Description of Artificial Sequence: Synthetic primer
tttctgtggatttgttttgttgaaggggagaagggaagtg

SEQ ID NO: 33432 - DNA, 40 bp, Artificial Sequence
  Description of Artificial Sequence: Synthetic primer
ggaggctccctgcagcatgtagtgcccagccaggtactcg

SEQ ID NO: 33433 - DNA, 40 bp, Artificial Sequence
  Description of Artificial Sequence: Synthetic primer
gtatttgtatgttgtaagcgtttcctaatctgtgtatatc

SEQ ID NO: 33434 - DNA, 40 bp, Artificial Sequence
  Description of Artificial Sequence: Synthetic primer
atatgggaccataatgcccaactggtggttatgattcctg

SEQ ID NO: 33435 - DNA, 40 bp, Artificial Sequence
  Description of Artificial Sequence: Synthetic primer
ccttaaggttccggaagagaaggtcattgtttttgtccag

SEQ ID NO: 33436 - DNA, 40 bp, Artificial Sequence
  Description of Artificial Sequence: Synthetic primer
gggcacaaagccattggagaggaaggtgtagttgttgaag

SEQ ID NO: 33437 - DNA, 40 bp, Artificial Sequence
  Description of Artificial Sequence: Synthetic primer
atgatgagtgatgcaagtgacatgttggctgcagcgttgg

SEQ ID NO: 33438 - DNA, 40 bp, Artificial Sequence
  Description of Artificial Sequence: Synthetic primer
tcaaggagaactccctatagcgatggctctggccaatgtg

SEQ ID NO: 33439 - DNA, 40 bp, Artificial Sequence
  Description of Artificial Sequence: Synthetic primer
ccttccgacgcattgtagaattccagtggttcttgatagc

SEQ ID NO: 33440 - DNA, 40 bp, Artificial Sequence
  Description of Artificial Sequence: Synthetic primer
ctgaagtcacttctcgtggtgcctctcctccctggcttgg

SEQ ID NO: 33441 - DNA, 40 bp, Artificial Sequence
  Description of Artificial Sequence: Synthetic primer
gccccctccattacaacagatgccacagcccccgactcag

SEQ ID NO: 33442 - DNA, 40 bp, Artificial Sequence
  Description of Artificial Sequence: Synthetic primer
atgcttgaattctatcctcttcacttcttcacctttgttg

SEQ ID NO: 33443 - DNA, 40 bp, Artificial Sequence
  Description of Artificial Sequence: Synthetic primer
cggcctggcccccgcttctccttcgtagggtccaacttgc

SEQ ID NO: 33444 - DNA, 40 bp, Artificial Sequence
  Description of Artificial Sequence: Synthetic primer
ttccataaaatttgttaaccattcttttctgtcatcaatc

SEQ ID NO: 33445 - DNA, 40 bp, Artificial Sequence
  Description of Artificial Sequence: Synthetic primer
gctgcgggtgccgccaccgccccagccctccttcttcacc

SEQ ID NO: 33446 - DNA, 40 bp, Artificial Sequence
  Description of Artificial Sequence: Synthetic primer
ccaggtgtccctgttgtggtacttctgcaagtcctccttc

SEQ ID NO: 33447 - DNA, 40 bp, Artificial Sequence
  Description of Artificial Sequence: Synthetic primer
ctgactccaggcctgaacccctcccgtgctgtaataaatc

SEQ ID NO: 33448 - DNA, 40 bp, Artificial Sequence
  Description of Artificial Sequence: Synthetic primer
aaatcaagctctattacattcgaaaagcaaacagcccaag

SEQ ID NO: 33449 - DNA, 40 bp, Artificial Sequence
  Description of Artificial Sequence: Synthetic primer
ctgcagattattggacttggcacttttgagcgtggagtag

SEQ ID NO: 33450 - DNA, 40 bp, Artificial Sequence
  Description of Artificial Sequence: Synthetic primer
ggtagccgtggccagggagctcgaggccgagaattaccac

SEQ ID NO: 33451 - DNA, 40 bp, Artificial Sequence
  Description of Artificial Sequence: Synthetic primer
gctgtgaaggtcaagctgaaatttaccatacatatcatac

SEQ ID NO: 33452 - DNA, 40 bp, Artificial Sequence
  Description of Artificial Sequence: Synthetic primer
ctccaaccactcggcccaggacagcgccgtggagaacctg

SEQ ID NO: 33453 - DNA, 40 bp, Artificial Sequence
  Description of Artificial Sequence: Synthetic primer
aataaaagtgacccatgatatgcagagatgtaattataga

SEQ ID NO: 33454 - DNA, 40 bp, Artificial Sequence
  Description of Artificial Sequence: Synthetic primer
tcctggagaacgaggcagaaccggtccactgggaagaaag

SEQ ID NO: 33455 - DNA, 40 bp, Artificial Sequence
  Description of Artificial Sequence: Synthetic primer
gagagggagagtgatctttctagcaaaacacagctgttac

SEQ ID NO: 33456 - DNA, 40 bp, Artificial Sequence
  Description of Artificial Sequence: Synthetic primer
ccatggagagtggcaaattagaaatgtagaggttggtagg

SEQ ID NO: 33457 - DNA, 40 bp, Artificial Sequence
  Description of Artificial Sequence: Synthetic primer
attcgggctgtggttgcttggtcactggcagtcttattcc

SEQ ID NO: 33458 - DNA, 40 bp, Artificial Sequence
  Description of Artificial Sequence: Synthetic primer
cttgagatggctagtcaaacgtcgaaaatcaaagaaaaag

SEQ ID NO: 33459 - DNA, 40 bp, Artificial Sequence
  Description of Artificial Sequence: Synthetic primer
ttctacaccactatagagagttacagttgcccccaaacac

SEQ ID NO: 33460 - DNA, 40 bp, Artificial Sequence
  Description of Artificial Sequence: Synthetic primer
gctgaaggtaggaccctacgccaataccactcgctactcc

SEQ ID NO: 33461 - DNA, 40 bp, Artificial Sequence
  Description of Artificial Sequence: Synthetic primer
ctccttcgagaattccaggaagagattgctcggctcaagg

SEQ ID NO: 33462 - DNA, 40 bp, Artificial Sequence
  Description of Artificial Sequence: Synthetic primer
gaacttgaactttgaagtgtggaggctgagggtgatggag

SEQ ID NO: 33463 - DNA, 40 bp, Artificial Sequence
  Description of Artificial Sequence: Synthetic primer
acatgaaatgagctcttcattaatacgcctgtgagtcttc

SEQ ID NO: 33464 - DNA, 40 bp, Artificial Sequence
  Description of Artificial Sequence: Synthetic primer
ctcctcttctggctcatttaaattcacccactggtttttc

SEQ ID NO: 33465 - DNA, 40 bp, Artificial Sequence
  Description of Artificial Sequence: Synthetic primer
aagacatagatccacatgtgtgacccagattcctttacac

SEQ ID NO: 33466 - DNA, 40 bp, Artificial Sequence
  Description of Artificial Sequence: Synthetic primer
gatccagttctcggtgcccgcgccccctagccagctcgac

SEQ ID NO: 33467 - DNA, 40 bp, Artificial Sequence
  Description of Artificial Sequence: Synthetic primer
ccccactgacgaattcttcctgaaggacttctctaccaag

SEQ ID NO: 33468 - DNA, 40 bp, Artificial Sequence
  Description of Artificial Sequence: Synthetic primer
ggccgaggtcaccggtttctcctttgggtcctctctcctg

SEQ ID NO: 33469 - DNA, 40 bp, Artificial Sequence
  Description of Artificial Sequence: Synthetic primer
gacgctggtgtccagtgcattcctcattgtcaaggtcatc

SEQ ID NO: 33470 - DNA, 40 bp, Artificial Sequence
  Description of Artificial Sequence: Synthetic primer
tttctgtatctatcaaagcctcttgtaaattcttattttt

SEQ ID NO: 33471 - DNA, 40 bp, Artificial Sequence
  Description of Artificial Sequence: Synthetic primer
ataaagtattaatttgattcttatgtcttttgtaagtgag

SEQ ID NO: 33472 - DNA, 40 bp, Artificial Sequence
  Description of Artificial Sequence: Synthetic primer
gatttttactgggtctaccagactggatggaaatgcaata

SEQ ID NO: 33473 - DNA, 40 bp, Artificial Sequence
  Description of Artificial Sequence: Synthetic primer
gacagggaagctctccatccccgagggaaagaagttcgac

SEQ ID NO: 33474 - DNA, 40 bp, Artificial Sequence
  Description of Artificial Sequence: Synthetic primer
caatgtcggcgtttctaagcttcaagatccccgcacagtc

SEQ ID NO: 33475 - DNA, 40 bp, Artificial Sequence
  Description of Artificial Sequence: Synthetic primer
ctgcgcacggctctcctccgcctcgcccacgcggccaatc

SEQ ID NO: 33476 - DNA, 40 bp, Artificial Sequence
  Description of Artificial Sequence: Synthetic primer
atataaatttggcggcagaatcctatgtcatgaaagttac

SEQ ID NO: 33477 - DNA, 40 bp, Artificial Sequence
  Description of Artificial Sequence: Synthetic primer
ttccattcgtcaaattcaggaatactgtagaaggaaagtt

SEQ ID NO: 33478 - DNA, 40 bp, Artificial Sequence
  Description of Artificial Sequence: Synthetic primer
aggcgacgcggaggcccctgcccctcaccttcagcgacac

SEQ ID NO: 33479 - DNA, 40 bp, Artificial Sequence
  Description of Artificial Sequence: Synthetic primer
acacatcttctcccagggcacccgctcagccaccacaaag

SEQ ID NO: 33480 - DNA, 40 bp, Artificial Sequence
  Description of Artificial Sequence: Synthetic primer
tgccattaacatgaaagatgtaaaagacttagggaagacg

SEQ ID NO: 33481 - DNA, 40 bp, Artificial Sequence
  Description of Artificial Sequence: Synthetic primer
acattacaggaattactcaagtttcaatgcgtcactgtag

SEQ ID NO: 33482 - DNA, 40 bp, Artificial Sequence
  Description of Artificial Sequence: Synthetic primer
gttagcagttttccatgtaaagttgtccttgactgatttg

SEQ ID NO: 33483 - DNA, 40 bp, Artificial Sequence
  Description of Artificial Sequence: Synthetic primer
caacccacaaagaaccttgtgaagtttggtcacaaacaag

SEQ ID NO: 33484 - DNA, 40 bp, Artificial Sequence
  Description of Artificial Sequence: Synthetic primer
gagggacggcatggccttcaatgcactgatacacaaacac

SEQ ID NO: 33485 - DNA, 40 bp, Artificial Sequence
  Description of Artificial Sequence: Synthetic primer
ccgttctgtatagcagctgtagttgggtcgtaagtaagtg

SEQ ID NO: 33486 - DNA, 40 bp, Artificial Sequence
  Description of Artificial Sequence: Synthetic primer
aaacaaaatacatgtcagttatcaagagactcaacagatg

SEQ ID NO: 33487 - DNA, 40 bp, Artificial Sequence
  Description of Artificial Sequence: Synthetic primer
ccattttaatgcaaatatagggcctttatgctgccctaag

SEQ ID NO: 33488 - DNA, 40 bp, Artificial Sequence
  Description of Artificial Sequence: Synthetic primer
cctctaggcaagttcaagttctacagaatcttactacaac

SEQ ID NO: 33489 - DNA, 40 bp, Artificial Sequence
  Description of Artificial Sequence: Synthetic primer
ggaccagcaggaccagggagaccaaactcaccatggagac

SEQ ID NO: 33490 - DNA, 40 bp, Artificial Sequence
  Description of Artificial Sequence: Synthetic primer
ccttaatgttctcctgtggattatcaagatctactgagtc

SEQ ID NO: 33491 - DNA, 40 bp, Artificial Sequence
  Description of Artificial Sequence: Synthetic primer
tggccagtagggaaggtcacatttgtcaggcggccaaagc

SEQ ID NO: 33492 - DNA, 40 bp, Artificial Sequence
  Description of Artificial Sequence: Synthetic primer
ataaaaaatgcaaaagtgagcccagactggttgtaaaatg

SEQ ID NO: 33493 - DNA, 40 bp, Artificial Sequence
  Description of Artificial Sequence: Synthetic primer
ctttcttaacttctggcttctttccttcatctttattctg

SEQ ID NO: 33494 - DNA, 40 bp, Artificial Sequence
  Description of Artificial Sequence: Synthetic primer
ggataaggaagcagacaaatccctcttaattggagtgttc

SEQ ID NO: 33495 - DNA, 40 bp, Artificial Sequence
  Description of Artificial Sequence: Synthetic primer
taaaactgtatgtgtaagaacaaaatgttaaaaggcctac

SEQ ID NO: 33496 - DNA, 40 bp, Artificial Sequence
  Description of Artificial Sequence: Synthetic primer
agactttgagctttagacaggaccttcttccattatctgg

SEQ ID NO: 33497 - DNA, 40 bp, Artificial Sequence
  Description of Artificial Sequence: Synthetic primer
actgttaaacatttctgaatatgcaagagaaagtcaagtg

SEQ ID NO: 33498 - DNA, 40 bp, Artificial Sequence
  Description of Artificial Sequence: Synthetic primer
gcaccaacgggaccaatattgccagggtaaccgcgctctc

SEQ ID NO: 33499 - DNA, 40 bp, Artificial Sequence
  Description of Artificial Sequence: Synthetic primer
aggtgcttgaatagcagaaagtggtggaagccaggtcatc

SEQ ID NO: 33500 - DNA, 40 bp, Artificial Sequence
  Description of Artificial Sequence: Synthetic primer
acagctgtcctccctgcctccccaggcctcctaccagagg

SEQ ID NO: 33501 - DNA, 40 bp, Artificial Sequence
  Description of Artificial Sequence: Synthetic primer
gctggagcgcctctcctcaagtgtcttgcctccgggattc

SEQ ID NO: 33502 - DNA, 40 bp, Artificial Sequence
  Description of Artificial Sequence: Synthetic primer
cacgtggctgtccggaagtacgaggagatgcgggaggaag

SEQ ID NO: 33503 - DNA, 40 bp, Artificial Sequence
  Description of Artificial Sequence: Synthetic primer
gaaagagtatctgaaggcactggctgcttacaaagacaac

SEQ ID NO: 33504 - DNA, 40 bp, Artificial Sequence
  Description of Artificial Sequence: Synthetic primer
tatgaggctgctatttttattttctgtgcattactttaac

SEQ ID NO: 33505 - DNA, 40 bp, Artificial Sequence
  Description of Artificial Sequence: Synthetic primer
actctggccagaacacaaacggcattggcactgtaagctc

SEQ ID NO: 33506 - DNA, 40 bp, Artificial Sequence
  Description of Artificial Sequence: Synthetic primer
cctgagcagagaaacttttcttcccagcaacttcttcatc

SEQ ID NO: 33507 - DNA, 40 bp, Artificial Sequence
  Description of Artificial Sequence: Synthetic primer
agcagctcctggttggcatcgatgcggtaattattctgag

SEQ ID NO: 33508 - DNA, 40 bp, Artificial Sequence
  Description of Artificial Sequence: Synthetic primer
cgctgatgagcatgatggcctggttgcagaggcttccttg

SEQ ID NO: 33509 - DNA, 40 bp, Artificial Sequence
  Description of Artificial Sequence: Synthetic primer
catgtccaccagggctgcctcctgctggtccttcccatag

SEQ ID NO: 33510 - DNA, 40 bp, Artificial Sequence
  Description of Artificial Sequence: Synthetic primer
aagatgagggtctggcgggactccttcttggtggagagag

SEQ ID NO: 33511 - DNA, 40 bp, Artificial Sequence
  Description of Artificial Sequence: Synthetic primer
ttccagcggggccgatatttccaggggaaccaggaagacc

SEQ ID NO: 33512 - DNA, 40 bp, Artificial Sequence
  Description of Artificial Sequence: Synthetic primer
gtgccaaattttgtattttgactttttgaatggagtgaag

SEQ ID NO: 33513 - DNA, 40 bp, Artificial Sequence
  Description of Artificial Sequence: Synthetic primer
ctgctgtacagggaaaatgagcctctctctgatgtttttc

SEQ ID NO: 33514 - DNA, 40 bp, Artificial Sequence
  Description of Artificial Sequence: Synthetic primer
gatgaactagaagcagcctgagatgcaggttggggttcag

SEQ ID NO: 33515 - DNA, 40 bp, Artificial Sequence
  Description of Artificial Sequence: Synthetic primer
tcttcaagctgaactccctgctgttgaacttgaccgagag

SEQ ID NO: 33516 - DNA, 40 bp, Artificial Sequence
  Description of Artificial Sequence: Synthetic primer
tccgagattggagcctaacagtgtagatcctgagaacatc

SEQ ID NO: 33517 - DNA, 40 bp, Artificial Sequence
  Description of Artificial Sequence: Synthetic primer
cccacagacccaagagtcaaggacagagagaaacctgttc

SEQ ID NO: 33518 - DNA, 40 bp, Artificial Sequence
  Description of Artificial Sequence: Synthetic primer
agccgctcctgacgccctcagagccatcaagcagaaacac

SEQ ID NO: 33519 - DNA, 40 bp, Artificial Sequence
  Description of Artificial Sequence: Synthetic primer
catcaagttcctcgtgggcagggacagcacgcacataatc

SEQ ID NO: 33520 - DNA, 40 bp, Artificial Sequence
  Description of Artificial Sequence: Synthetic primer
acacagttaatatgccagaaaaagaaagaaaaggagttag

SEQ ID NO: 33521 - DNA, 40 bp, Artificial Sequence
  Description of Artificial Sequence: Synthetic primer
accctccatgccgtctaggtcttcgttccactcctccatc

SEQ ID NO: 33522 - DNA, 40 bp, Artificial Sequence
  Description of Artificial Sequence: Synthetic primer
ttgagaagaaggctagtaacgtactgtttgctgatgaagc

SEQ ID NO: 33523 - DNA, 40 bp, Artificial Sequence
  Description of Artificial Sequence: Synthetic primer
ggtggaatatgagctgagtgaggagggagatgagccacag

SEQ ID NO: 33524 - DNA, 40 bp, Artificial Sequence
  Description of Artificial Sequence: Synthetic primer
ccctgattgtggaagaatcaaaagggcaaatcggcgtgtg

SEQ ID NO: 33525 - DNA, 40 bp, Artificial Sequence
  Description of Artificial Sequence: Synthetic primer
ttttcggggatcgaggatactcaccagaaaccgaaaatgc

SEQ ID NO: 33526 - DNA, 40 bp, Artificial Sequence
  Description of Artificial Sequence: Synthetic primer
gggccggcacaacggcgtggatggactcatcccccatcag

SEQ ID NO: 33527 - DNA, 40 bp, Artificial Sequence
  Description of Artificial Sequence: Synthetic primer
agccagtcccagcctcctacaccacggcctccacttcttc

SEQ ID NO: 33528 - DNA, 40 bp, Artificial Sequence
  Description of Artificial Sequence: Synthetic primer
aagattaaaaacttttttgatgcagaagattattatattg

SEQ ID NO: 33529 - DNA, 40 bp, Artificial Sequence
  Description of Artificial Sequence: Synthetic primer
ggcttgtttattaagcaagccccataaccttctgccattg

SEQ ID NO: 33530 - DNA, 40 bp, Artificial Sequence
  Description of Artificial Sequence: Synthetic primer
ctcagagaagaggatcctagaggagctgtgctctccattc

SEQ ID NO: 33531 - DNA, 40 bp, Artificial Sequence
  Description of Artificial Sequence: Synthetic primer
tcctggagaagacggctaccgaggctatcctggtgatgag

SEQ ID NO: 33532 - DNA, 40 bp, Artificial Sequence
  Description of Artificial Sequence: Synthetic primer
cccccgtatcaaggcctctccccagaagaatcagtcaacg

SEQ ID NO: 33533 - DNA, 40 bp, Artificial Sequence
  Description of Artificial Sequence: Synthetic primer
tcagtccacacaagccccatggccgtgttccccacttcag

SEQ ID NO: 33534 - DNA, 40 bp, Artificial Sequence
  Description of Artificial Sequence: Synthetic primer
gtacactgcctgctgccagtgagctgcctgcgtcccaaag

SEQ ID NO: 33535 - DNA, 40 bp, Artificial Sequence
  Description of Artificial Sequence: Synthetic primer
tttttattttctgcttccaaaacacattcttcatctttac

SEQ ID NO: 33536 - DNA, 40 bp, Artificial Sequence
  Description of Artificial Sequence: Synthetic primer
gagctttcccgaactcatgacggccgccaagttcctgctg

SEQ ID NO: 33537 - DNA, 40 bp, Artificial Sequence
  Description of Artificial Sequence: Synthetic primer
tgtccgcttccgtttcatggcgtgacgtggctttgttttg

SEQ ID NO: 33538 - DNA, 40 bp, Artificial Sequence
  Description of Artificial Sequence: Synthetic primer
ggatcacattagagatatttagaacatattaccctgtgac

SEQ ID NO: 33539 - DNA, 40 bp, Artificial Sequence
  Description of Artificial Sequence: Synthetic primer
gttcaagcctcaagctcttcttgataaagcaaaaatcaac

SEQ ID NO: 33540 - DNA, 40 bp, Artificial Sequence
  Description of Artificial Sequence: Synthetic primer
gaagatcttcgccctgaggcacggctaccgggtggacagc

SEQ ID NO: 33541 - DNA, 40 bp, Artificial Sequence
  Description of Artificial Sequence: Synthetic primer
gcagcagggccctcagtgccagcgtcctgcagtcctcgtc

SEQ ID NO: 33542 - DNA, 40 bp, Artificial Sequence
  Description of Artificial Sequence: Synthetic primer
cacgacggcgtcggcgagaggacagctaccatgtccgttc

SEQ ID NO: 33543 - DNA, 40 bp, Artificial Sequence
  Description of Artificial Sequence: Synthetic primer
ggctgcgagcgactccccggcgatgcctcacaactccatc

SEQ ID NO: 33544 - DNA, 40 bp, Artificial Sequence
  Description of Artificial Sequence: Synthetic primer
gagggtctgaacggtcttggagatcaatgtcagcgtcctg

SEQ ID NO: 33545 - DNA, 40 bp, Artificial Sequence
  Description of Artificial Sequence: Synthetic primer
cagaacttcattgaccccctccagaacctgtgcgagaaag

SEQ ID NO: 33546 - DNA, 40 bp, Artificial Sequence
  Description of Artificial Sequence: Synthetic primer
aatggagtccaacaggaccagggactaataatccaaatgc

SEQ ID NO: 33547 - DNA, 40 bp, Artificial Sequence
  Description of Artificial Sequence: Synthetic primer
taataatacaaacaaaagtttaaatgatatgtgaaaagac

SEQ ID NO: 33548 - DNA, 40 bp, Artificial Sequence
  Description of Artificial Sequence: Synthetic primer
agagctggctatgcctatcggcgcatcttccaaaaattcc

SEQ ID NO: 33549 - DNA, 40 bp, Artificial Sequence
  Description of Artificial Sequence: Synthetic primer
caccccgggcaagtccccagggtggtgctcagccgagagg

SEQ ID NO: 33550 - DNA, 40 bp, Artificial Sequence
  Description of Artificial Sequence: Synthetic primer
accacatctgccagaccttaataaaggcccccacttctcc

SEQ ID NO: 33551 - DNA, 40 bp, Artificial Sequence
  Description of Artificial Sequence: Synthetic primer
gatctctgaactgctggttccagccgatagccaaaatatg

SEQ ID NO: 33552 - DNA, 40 bp, Artificial Sequence
  Description of Artificial Sequence: Synthetic primer
gccctgcgatccgggctccaggccgcccctggtgtgagtg

SEQ ID NO: 33553 - DNA, 40 bp, Artificial Sequence
  Description of Artificial Sequence: Synthetic primer
gcccatcatagtcatggtcacacatctcaaagtcctcatc

SEQ ID NO: 33554 - DNA, 40 bp, Artificial Sequence
  Description of Artificial Sequence: Synthetic primer
caaaattatattacaagtgttggaagccactgccactacg

SEQ ID NO: 33555 - DNA, 40 bp, Artificial Sequence
  Description of Artificial Sequence: Synthetic primer
tcctggcttccaggtcctcccaagctctccctgtgttctg

SEQ ID NO: 33556 - DNA, 40 bp, Artificial Sequence
  Description of Artificial Sequence: Synthetic primer
acgaagagaaaacttcgggaacattactgcctgggtaagg

SEQ ID NO: 33557 - DNA, 40 bp, Artificial Sequence
  Description of Artificial Sequence: Synthetic primer
ggctttaaactgttgtgccagtgcttaggctttggaagtg

SEQ ID NO: 33558 - DNA, 40 bp, Artificial Sequence
  Description of Artificial Sequence: Synthetic primer
tatggtgctaatgtgtctgtggaccctcgctctctgtctc

SEQ ID NO: 33559 - DNA, 40 bp, Artificial Sequence
  Description of Artificial Sequence: Synthetic primer
gatgacgggagagacggagttggcagtgaaggacgcagag

SEQ ID NO: 33560 - DNA, 40 bp, Artificial Sequence
  Description of Artificial Sequence: Synthetic primer
acaaaaagatggcatcagtaagtcagcaggtttagaacag

SEQ ID NO: 33561 - DNA, 40 bp, Artificial Sequence
  Description of Artificial Sequence: Synthetic primer
tgagttgcaataagaaagtggtacatctacatgagatgcc

SEQ ID NO: 33562 - DNA, 40 bp, Artificial Sequence
  Description of Artificial Sequence: Synthetic primer
ggctatggactgccctacaccacagggaaactgccctatg

SEQ ID NO: 33563 - DNA, 40 bp, Artificial Sequence
  Description of Artificial Sequence: Synthetic primer
catgaagaaccgctcagggctggggacggcccatatcttc

SEQ ID NO: 33564 - DNA, 40 bp, Artificial Sequence
  Description of Artificial Sequence: Synthetic primer
acacacacatacagagctctctgagggtgatggggctgag

SEQ ID NO: 33565 - DNA, 40 bp, Artificial Sequence
  Description of Artificial Sequence: Synthetic primer
gcaatgccctgaattccaactgaccttctacagaaaagtg

SEQ ID NO: 33566 - DNA, 40 bp, Artificial Sequence
  Description of Artificial Sequence: Synthetic primer
ggccacttcggaaatggtcatctttatccaaactcactgc

SEQ ID NO: 33567 - DNA, 40 bp, Artificial Sequence
  Description of Artificial Sequence: Synthetic primer
accacatatgttagtggaggtgtggaggaagtaccactcg

SEQ ID NO: 33568 - DNA, 40 bp, Artificial Sequence
  Description of Artificial Sequence: Synthetic primer
atcagtcttctcggggtttccactgaagaagacaaattcc

SEQ ID NO: 33569 - DNA, 40 bp, Artificial Sequence
  Description of Artificial Sequence: Synthetic primer
gcacggtacaggccgttccttctgcgggagccctttctcc

SEQ ID NO: 33570 - DNA, 40 bp, Artificial Sequence
  Description of Artificial Sequence: Synthetic primer
tgctccaatgacaccaaaacagattctgcaggtcatagag

SEQ ID NO: 33571 - DNA, 40 bp, Artificial Sequence
  Description of Artificial Sequence: Synthetic primer
cattcttcgggggtgcatcagagggagggcagagcctgag

SEQ ID NO: 33572 - DNA, 40 bp, Artificial Sequence
  Description of Artificial Sequence: Synthetic primer
ttctgcagaacgtgggagaacctggcagccacttgatgtc

SEQ ID NO: 33573 - DNA, 40 bp, Artificial Sequence
  Description of Artificial Sequence: Synthetic primer
gccccggcaacaggaggaactgaactggttggaggtacag

SEQ ID NO: 33574 - DNA, 40 bp, Artificial Sequence
  Description of Artificial Sequence: Synthetic primer
ccaagtagaaaagatggctgggaagtcctttctaataatg

SEQ ID NO: 33575 - DNA, 40 bp, Artificial Sequence
  Description of Artificial Sequence: Synthetic primer
tccggaagacatggattgtctggaagatgtggattttctg

SEQ ID NO: 33576 - DNA, 40 bp, Artificial Sequence
  Description of Artificial Sequence: Synthetic primer
gtaatttggttgagctattctgtccaagtcattcaaatag

SEQ ID NO: 33577 - DNA, 40 bp, Artificial Sequence
  Description of Artificial Sequence: Synthetic primer
gcttctccagctgaggcttctgactgatgatggcctgctc

SEQ ID NO: 33578 - DNA, 40 bp, Artificial Sequence
  Description of Artificial Sequence: Synthetic primer
ctgttcatgaagagcgaagactatccccatgaaactatgg

SEQ ID NO: 33579 - DNA, 40 bp, Artificial Sequence
  Description of Artificial Sequence: Synthetic primer
ggccccccgccggggtgcacacccccgactgagcgttcac

SEQ ID NO: 33580 - DNA, 40 bp, Artificial Sequence
  Description of Artificial Sequence: Synthetic primer
tttgatcaagataagctgccttaagttctcttcattacac

SEQ ID NO: 33581 - DNA, 40 bp, Artificial Sequence
  Description of Artificial Sequence: Synthetic primer
ttcccttggagtctgtaccccaccagacatggagtttgtg

SEQ ID NO: 33582 - DNA, 40 bp, Artificial Sequence
  Description of Artificial Sequence: Synthetic primer
tgtcaactttaatttcgtagatttcattatgtcttaggtc

SEQ ID NO: 33583 - DNA, 40 bp, Artificial Sequence
  Description of Artificial Sequence: Synthetic primer
ctttgtatttctttagttcacttcgaagcctgttaatttc

SEQ ID NO: 33584 - DNA, 40 bp, Artificial Sequence
  Description of Artificial Sequence: Synthetic primer
ggcggcattgcaagctcagaatcacaagctcggccgttgg

SEQ ID NO: 33585 - DNA, 40 bp, Artificial Sequence
  Description of Artificial Sequence: Synthetic primer
ggtgacattacttccattcctgaacttgctgactacatta

SEQ ID NO: 33586 - DNA, 40 bp, Artificial Sequence
  Description of Artificial Sequence: Synthetic primer
gcatttaaatttaaagccctaaagaaggttgcgcagttag

SEQ ID NO: 33587 - DNA, 40 bp, Artificial Sequence
  Description of Artificial Sequence: Synthetic primer
gccgggcgcctgagctgcgcctccctgcactctctccttg

SEQ ID NO: 33588 - DNA, 40 bp, Artificial Sequence
  Description of Artificial Sequence: Synthetic primer
agggtggtaccacatgtcttcaaaatgaaacgtctcttgg

SEQ ID NO: 33589 - DNA, 40 bp, Artificial Sequence
  Description of Artificial Sequence: Synthetic primer
cagcctgaagatccttatgagtattcaccaatccccttgg

SEQ ID NO: 33590 - DNA, 40 bp, Artificial Sequence
  Description of Artificial Sequence: Synthetic primer
gatcaccgtgtgctcggagggatttgtggcccggatcgac

SEQ ID NO: 33591 - DNA, 40 bp, Artificial Sequence
  Description of Artificial Sequence: Synthetic primer
ggtggctgcaaggtatccttcagaacctttgggagaggac

SEQ ID NO: 33592 - DNA, 40 bp, Artificial Sequence
  Description of Artificial Sequence: Synthetic primer
atcgttgagcttcagcgtgacgtacttctggtccgggatg

SEQ ID NO: 33593 - DNA, 40 bp, Artificial Sequence
  Description of Artificial Sequence: Synthetic primer
catattgttaccttgtctagccttaggaagaaaacaagag

SEQ ID NO: 33594 - DNA, 40 bp, Artificial Sequence
  Description of Artificial Sequence: Synthetic primer
ccggttctgcctcgttctccaggagcaccagcggcacctc

SEQ ID NO: 33595 - DNA, 40 bp, Artificial Sequence
  Description of Artificial Sequence: Synthetic primer
cacataacttttcacccagacaaaatttcttccagccttc

SEQ ID NO: 33596 - DNA, 40 bp, Artificial Sequence
  Description of Artificial Sequence: Synthetic primer
gaaaatgcattggggtgaataatagcaattttgttccaag

SEQ ID NO: 33597 - DNA, 40 bp, Artificial Sequence
  Description of Artificial Sequence: Synthetic primer
tatcataaggaaaaatagaaaggaaaacttgaatcaatac

SEQ ID NO: 33598 - DNA, 40 bp, Artificial Sequence
  Description of Artificial Sequence: Synthetic primer
acaagcgataggctattgcaacctgagaaagagaactgct

SEQ ID NO: 33599 - DNA, 40 bp, Artificial Sequence
  Description of Artificial Sequence: Synthetic primer
tgccgagccaggctgaaccgggtatatgacaatggttctc

SEQ ID NO: 33600 - DNA, 40 bp, Artificial Sequence
  Description of Artificial Sequence: Synthetic primer
tggtgaaagaagtcctgaagcggaaaatcgagatagaacg

SEQ ID NO: 33601 - DNA, 40 bp, Artificial Sequence
  Description of Artificial Sequence: Synthetic primer
agctcccgggcttggtctgatcatctagtttctgccgatg

SEQ ID NO: 33602 - DNA, 40 bp, Artificial Sequence
  Description of Artificial Sequence: Synthetic primer
gtttggaaggcagacgacctctcctccctttcagactatc

SEQ ID NO: 33603 - DNA, 40 bp, Artificial Sequence
  Description of Artificial Sequence: Synthetic primer
gctgcagcacacgtctgagcaggaggagatgcgggcgttc

SEQ ID NO: 33604 - DNA, 40 bp, Artificial Sequence
  Description of Artificial Sequence: Synthetic primer
gatgacacagttcaccactcctattattagtagacccaag

SEQ ID NO: 33605 - DNA, 40 bp, Artificial Sequence
  Description of Artificial Sequence: Synthetic primer
taatcttctgcatcaaaaaagtttttaatcttgatgatgc

SEQ ID NO: 33606 - DNA, 40 bp, Artificial Sequence
  Description of Artificial Sequence: Synthetic primer
tatagaaaaactactgattttattattatcaatgccaaac

SEQ ID NO: 33607 - DNA, 40 bp, Artificial Sequence
  Description of Artificial Sequence: Synthetic primer
gaggggaatgccaagcctgccacccttttctgctttgctg

SEQ ID NO: 33608 - DNA, 40 bp, Artificial Sequence
  Description of Artificial Sequence: Synthetic primer
attttctgaggccctttgagcatattatgaagaaaaacag

SEQ ID NO: 33609 - DNA, 40 bp, Artificial Sequence
  Description of Artificial Sequence: Synthetic primer
ttcctacctggctgagttcctgctggagaaaggctatgag

SEQ ID NO: 33610 - DNA, 40 bp, Artificial Sequence
  Description of Artificial Sequence: Synthetic primer
cctcgcagctaactacagggcaggcagcccattcacaaag

SEQ ID NO: 33611 - DNA, 40 bp, Artificial Sequence
  Description of Artificial Sequence: Synthetic primer
cagtggtcactgcacagcttatgagtcatatttttaaagc

SEQ ID NO: 33612 - DNA, 40 bp, Artificial Sequence
  Description of Artificial Sequence: Synthetic primer
gggcacccgggctggcctcctgagaagcagcttgttcgtg

SEQ ID NO: 33613 - DNA, 40 bp, Artificial Sequence
  Description of Artificial Sequence: Synthetic primer
gctttgatagaataattttcttttgattattcatgatgtg

SEQ ID NO: 33614 - DNA, 40 bp, Artificial Sequence
  Description of Artificial Sequence: Synthetic primer
cccccgagtgctgcaggccttgggctctgagcccattcag

SEQ ID NO: 33615 - DNA, 40 bp, Artificial Sequence
  Description of Artificial Sequence: Synthetic primer
tgcacgtggaaactctgaacctgtcccgaaatcagctcac

SEQ ID NO: 33616 - DNA, 40 bp, Artificial Sequence
  Description of Artificial Sequence: Synthetic primer
gtggaagaacacatggatctctctggctttctcacccaag

SEQ ID NO: 33617 - DNA, 40 bp, Artificial Sequence
  Description of Artificial Sequence: Synthetic primer
acaattaaaagacctttaaatcctttggcttctggtcaag

SEQ ID NO: 33618 - DNA, 40 bp, Artificial Sequence
  Description of Artificial Sequence: Synthetic primer
aaaaagcaagtatcaatctgtgaaataaaaatgcaccttg

SEQ ID NO: 33619 - DNA, 40 bp, Artificial Sequence
  Description of Artificial Sequence: Synthetic primer
agcaccagcaagaccagcatgacctttatcaccgtttttg

SEQ ID NO: 33620 - DNA, 40 bp, Artificial Sequence
  Description of Artificial Sequence: Synthetic primer
atttgagatttatttctctacttagctagtaaaacttgtc

SEQ ID NO: 33621 - DNA, 40 bp, Artificial Sequence
  Description of Artificial Sequence: Synthetic primer
ggagtggagccaggggtagagcttaaagaagctggctctg

SEQ ID NO: 33622 - DNA, 40 bp, Artificial Sequence
  Description of Artificial Sequence: Synthetic primer
gtccaggcggcatggagaaggacggcctgtgccgcgctga

SEQ ID NO: 33623 - DNA, 40 bp, Artificial Sequence
  Description of Artificial Sequence: Synthetic primer
accccaccatctctatgctttgcttgcccagactcccttc

SEQ ID NO: 33624 - DNA, 40 bp, Artificial Sequence
  Description of Artificial Sequence: Synthetic primer
tcagctgtgttcatgtggtggtctgtggaaagaaaagaag

SEQ ID NO: 33625 - DNA, 40 bp, Artificial Sequence
  Description of Artificial Sequence: Synthetic primer
cgggcacctgcatctgcaaccctggctacaagggcgagag

SEQ ID NO: 33626 - DNA, 40 bp, Artificial Sequence
  Description of Artificial Sequence: Synthetic primer
tcctctccaccacaaggggcctctcctgtgcctgagagtt

SEQ ID NO: 33627 - DNA, 40 bp, Artificial Sequence
  Description of Artificial Sequence: Synthetic primer
aacactgtggcctgaggcatgataagaaacggctttgtag

SEQ ID NO: 33628 - DNA, 40 bp, Artificial Sequence
  Description of Artificial Sequence: Synthetic primer
ctgtaccctgtcaggcggccatctgatccagcaggtcatc

SEQ ID NO: 33629 - DNA, 40 bp, Artificial Sequence
  Description of Artificial Sequence: Synthetic primer
tccaagatgtccttcaccacctcctgggctccgtcatcag

SEQ ID NO: 33630 - DNA, 40 bp, Artificial Sequence
  Description of Artificial Sequence: Synthetic primer
ggaagaggagtgcgtcttgttttgggaactgcttcacagg

SEQ ID NO: 33631 - DNA, 40 bp, Artificial Sequence
  Description of Artificial Sequence: Synthetic primer
aaagactgcgctagctgtcaaataaaagacagtgaaattg

SEQ ID NO: 33632 - DNA, 40 bp, Artificial Sequence
  Description of Artificial Sequence: Synthetic primer
tgtcaccaggagctacattcatgtcatcacttgtgtattc

SEQ ID NO: 33633 - DNA, 40 bp, Artificial Sequence
  Description of Artificial Sequence: Synthetic primer
gacctggagttccattttcaccaggggcaccaggttcacc

SEQ ID NO: 33634 - DNA, 40 bp, Artificial Sequence
  Description of Artificial Sequence: Synthetic primer
taccgctctctcctttggagccagctggaccaggctcacc

SEQ ID NO: 33635 - DNA, 40 bp, Artificial Sequence
  Description of Artificial Sequence: Synthetic primer
tcgcaaattctgcagagcttctgtgggtacgtgtcttagc

SEQ ID NO: 33636 - DNA, 40 bp, Artificial Sequence
  Description of Artificial Sequence: Synthetic primer
agcattttgaaggagagcatgtgtcaaggtaggccagagg

SEQ ID NO: 33637 - DNA, 40 bp, Artificial Sequence
  Description of Artificial Sequence: Synthetic primer
tcatggtttgcaaataatgcaggtctgaaaagagaaaaag

SEQ ID NO: 33638 - DNA, 40 bp, Artificial Sequence
  Description of Artificial Sequence: Synthetic primer
cccttttggctgtgttttgataaaattagaaatgagtacc

SEQ ID NO: 33639 - DNA, 40 bp, Artificial Sequence
  Description of Artificial Sequence: Synthetic primer
agaagctggctgagcgcttctcctccaaaatccgcagctc

SEQ ID NO: 33640 - DNA, 40 bp, Artificial Sequence
  Description of Artificial Sequence: Synthetic primer
gggcctgtggaagaagcgccgcgcacggacttcggcagag

SEQ ID NO: 33641 - DNA, 40 bp, Artificial Sequence
  Description of Artificial Sequence: Synthetic primer
cccctcccacccacctctccccagagatcgatccaaagac

SEQ ID NO: 33642 - DNA, 40 bp, Artificial Sequence
  Description of Artificial Sequence: Synthetic primer
gctgggcagtctgaggactcctatttgcaagctgccaacg

SEQ ID NO: 33643 - DNA, 40 bp, Artificial Sequence
  Description of Artificial Sequence: Synthetic primer
cgatgagcccagaaccatgttctccttggacacctactcc

SEQ ID NO: 33644 - DNA, 40 bp, Artificial Sequence
  Description of Artificial Sequence: Synthetic primer
cagggtcttgaaaagccaggctcatttcatggcagtaaag

SEQ ID NO: 33645 - DNA, 40 bp, Artificial Sequence
  Description of Artificial Sequence: Synthetic primer
tctggaccaatgttggtgaatcgcaggtcagtgggaggag

SEQ ID NO: 33646 - DNA, 40 bp, Artificial Sequence
  Description of Artificial Sequence: Synthetic primer
tgaaggacaatcgtacttcatctgcaaactctacggtgac

SEQ ID NO: 33647 - DNA, 40 bp, Artificial Sequence
  Description of Artificial Sequence: Synthetic primer
tggaagcgaagggcccacacgaattccagcagggccttgc

SEQ ID NO: 33648 - DNA, 40 bp, Artificial Sequence
  Description of Artificial Sequence: Synthetic primer
ttgaattgtgtatcactctgatttgaacactaagtttctg

SEQ ID NO: 33649 - DNA, 40 bp, Artificial Sequence
  Description of Artificial Sequence: Synthetic primer
cagccattactccccagtggaatggatccaactcgacaac

SEQ ID NO: 33650 - DNA, 40 bp, Artificial Sequence
  Description of Artificial Sequence: Synthetic primer
tctccaagatggaatggtcacaaacacaagcctcactagc

SEQ ID NO: 33651 - DNA, 40 bp, Artificial Sequence
  Description of Artificial Sequence: Synthetic primer
attgtagctgaatatgaaaagactattgctcaaatgattg

SEQ ID NO: 33652 - DNA, 40 bp, Artificial Sequence
  Description of Artificial Sequence: Synthetic primer
catctctcctagggataataaataatgcactgcacaatac

SEQ ID NO: 33653 - DNA, 40 bp, Artificial Sequence
  Description of Artificial Sequence: Synthetic primer
tgttcttcagtggaccaagcatgatgattcttcagataac

SEQ ID NO: 33654 - DNA, 40 bp, Artificial Sequence
  Description of Artificial Sequence: Synthetic primer
ggcgtgatcaacattttgttaagattcaggtcaaagacag

SEQ ID NO: 33655 - DNA, 40 bp, Artificial Sequence
  Description of Artificial Sequence: Synthetic primer
ttttcttcagtgttaaaatatctgggaaaacgggattctg

SEQ ID NO: 33656 - DNA, 40 bp, Artificial Sequence
  Description of Artificial Sequence: Synthetic primer
accattatttacaagaagcaaaaaagctaaagcacaatgc

SEQ ID NO: 33657 - DNA, 40 bp, Artificial Sequence
  Description of Artificial Sequence: Synthetic primer
ctgaggagcatgccctcgatggtctcctccacctccttcg

SEQ ID NO: 33658 - DNA, 40 bp, Artificial Sequence
  Description of Artificial Sequence: Synthetic primer
ctggaaaacccggacgacctggtgagagaggagttgttgg

SEQ ID NO: 33659 - DNA, 40 bp, Artificial Sequence
  Description of Artificial Sequence: Synthetic primer
ggagtgctggcagcctctgggctggctttcttggatacag

SEQ ID NO: 33660 - DNA, 40 bp, Artificial Sequence
  Description of Artificial Sequence: Synthetic primer
ggcccttttgatactgagatggtgtagcacacttacaacc

SEQ ID NO: 33661 - DNA, 40 bp, Artificial Sequence
  Description of Artificial Sequence: Synthetic primer
ccctttcactagtgtttgagtggcacaagccacatttacc

SEQ ID NO: 33662 - DNA, 40 bp, Artificial Sequence
  Description of Artificial Sequence: Synthetic primer
gtcacttaattttcccttaatcattatttctttcattttg

SEQ ID NO: 33663 - DNA, 40 bp, Artificial Sequence
  Description of Artificial Sequence: Synthetic primer
cttcgctgatgggaagacatggagctacacatacttagag

SEQ ID NO: 33664 - DNA, 40 bp, Artificial Sequence
  Description of Artificial Sequence: Synthetic primer
gagccatcggccccgatgtagtagctgttccggacttggt

SEQ ID NO: 33665 - DNA, 40 bp, Artificial Sequence
  Description of Artificial Sequence: Synthetic primer
gccggcctcaaatctttccatttaacaaaccccagtgatg

SEQ ID NO: 33666 - DNA, 40 bp, Artificial Sequence
  Description of Artificial Sequence: Synthetic primer
tctctgcctagcagtgttgcccaaagtaattttccacaag

SEQ ID NO: 33667 - DNA, 40 bp, Artificial Sequence
  Description of Artificial Sequence: Synthetic primer
gcacacgccgatttgcccttttgattcttccacaatcagg

SEQ ID NO: 33668 - DNA, 40 bp, Artificial Sequence
  Description of Artificial Sequence: Synthetic primer
ggattcatgtcgaggctagaggcatttggaacaacaaatc

SEQ ID NO: 33669 - DNA, 40 bp, Artificial Sequence
  Description of Artificial Sequence: Synthetic primer
gtctgttttccagtcagagggacagtctccttccatattc

SEQ ID NO: 33670 - DNA, 40 bp, Artificial Sequence
  Description of Artificial Sequence: Synthetic primer
aactgcataatttcacacaagtaggggtagtacattgaag

SEQ ID NO: 33671 - DNA, 40 bp, Artificial Sequence
  Description of Artificial Sequence: Synthetic primer
atttgaaactaaaaccccaaccccaaagagaagcatttac

SEQ ID NO: 33672 - DNA, 40 bp, Artificial Sequence
  Description of Artificial Sequence: Synthetic primer
ttttaaagcaaggagccgttttttgttactaggtggatac

SEQ ID NO: 33673 - DNA, 40 bp, Artificial Sequence
  Description of Artificial Sequence: Synthetic primer
gacctggccaggccagcctccctgtgcgtgtgcgtctctg

SEQ ID NO: 33674 - DNA, 40 bp, Artificial Sequence
  Description of Artificial Sequence: Synthetic primer
gacggagcgtatctactccctcttcaacttgtacatgagc

SEQ ID NO: 33675 - DNA, 40 bp, Artificial Sequence
  Description of Artificial Sequence: Synthetic primer
ggtccgagagtggaagatcccatggtcacttcggtttagc

SEQ ID NO: 33676 - DNA, 40 bp, Artificial Sequence
  Description of Artificial Sequence: Synthetic primer
cattggcaaatattcttcgtggactggcctcaaccattag

SEQ ID NO: 33677 - DNA, 40 bp, Artificial Sequence
  Description of Artificial Sequence: Synthetic primer
ttgtggggaatccacgtggttgacgttagaacctcccttc

SEQ ID NO: 33678 - DNA, 40 bp, Artificial Sequence
  Description of Artificial Sequence: Synthetic primer
gttcccatggcgggtctggtggcaacagcttggagaaaag

SEQ ID NO: 33679 - DNA, 40 bp, Artificial Sequence
  Description of Artificial Sequence: Synthetic primer
ttgaagccaggaagtccaggagttccagggaaaccacgag

SEQ ID NO: 33680 - DNA, 40 bp, Artificial Sequence
  Description of Artificial Sequence: Synthetic primer
gatgtattctccgtggccccgggacagcaccacccccaaa

SEQ ID NO: 33681 - DNA, 40 bp, Artificial Sequence
  Description of Artificial Sequence: Synthetic primer
gatggtgtctctcctccttctgtctttatggaaattatgg

SEQ ID NO: 33682 - DNA, 40 bp, Artificial Sequence
  Description of Artificial Sequence: Synthetic primer
tttgcagctgccttagcagctgcttctggtgacacaaccc

SEQ ID NO: 33683 - DNA, 40 bp, Artificial Sequence
  Description of Artificial Sequence: Synthetic primer
gcctaggacatgcccggcgaggcccgcacgctcgtggcag

SEQ ID NO: 33684 - DNA, 40 bp, Artificial Sequence
  Description of Artificial Sequence: Synthetic primer
caaaaggaggaatcgggaaccggggccctcgtggggagac

SEQ ID NO: 33685 - DNA, 40 bp, Artificial Sequence
  Description of Artificial Sequence: Synthetic primer
gattcccgtacctgggccgggctgggaattttaaccatga

SEQ ID NO: 33686 - DNA, 40 bp, Artificial Sequence
  Description of Artificial Sequence: Synthetic primer
ggcacaggagcagggggcatggcacctctgttgtttatgc

SEQ ID NO: 33687 - DNA, 40 bp, Artificial Sequence
  Description of Artificial Sequence: Synthetic primer
gtttttcagaatggagaatctgcaactcatcataatcctg

SEQ ID NO: 33688 - DNA, 40 bp, Artificial Sequence
  Description of Artificial Sequence: Synthetic primer
tggagctgcccacccgaacattacccgataactatattgc

SEQ ID NO: 33689 - DNA, 40 bp, Artificial Sequence
  Description of Artificial Sequence: Synthetic primer
aagtgaaggttaattccagaagagaggaatgacttgaagg

SEQ ID NO: 33690 - DNA, 40 bp, Artificial Sequence
  Description of Artificial Sequence: Synthetic primer
atggccttggtgtggcggctgaagagggtggtgctctttc

SEQ ID NO: 33691 - DNA, 40 bp, Artificial Sequence
  Description of Artificial Sequence: Synthetic primer
cctcctgctgtagctgggaataaatgtccaccaggctttc

SEQ ID NO: 33692 - DNA, 40 bp, Artificial Sequence
  Description of Artificial Sequence: Synthetic primer
ccctccttgtggtcggcatcatgtgtgtggtggcctactg

SEQ ID NO: 33693 - DNA, 40 bp, Artificial Sequence
  Description of Artificial Sequence: Synthetic primer
ttctgccgccatcttggttccgcgttccctgcacagtaag

SEQ ID NO: 33694 - DNA, 40 bp, Artificial Sequence
  Description of Artificial Sequence: Synthetic primer
agactgtgagcactccagtgtcagggtttgcctccagatg

SEQ ID NO: 33695 - DNA, 40 bp, Artificial Sequence
  Description of Artificial Sequence: Synthetic primer
ctgaggacagaagccagggtgcccaggaccccagtgaaag

SEQ ID NO: 33696 - DNA, 40 bp, Artificial Sequence
  Description of Artificial Sequence: Synthetic primer
ccagctggagcactcggaacccattgaggcagagcctgag

SEQ ID NO: 33697 - DNA, 40 bp, Artificial Sequence
  Description of Artificial Sequence: Synthetic primer
tgggagggactgaaagcacggagccttccatcacctttgc

SEQ ID NO: 33698 - DNA, 40 bp, Artificial Sequence
  Description of Artificial Sequence: Synthetic primer
ccgctgtgtagatctggactttcccgtaaggcttattcac

SEQ ID NO: 33699 - DNA, 40 bp, Artificial Sequence
  Description of Artificial Sequence: Synthetic primer
ttccagctgtttctgcacccgcctcagttccttcaggatg

SEQ ID NO: 33700 - DNA, 40 bp, Artificial Sequence
  Description of Artificial Sequence: Synthetic primer
tattgtacaatgaacagaggttggtccgagaagccaacaa

SEQ ID NO: 33701 - DNA, 40 bp, Artificial Sequence
  Description of Artificial Sequence: Synthetic primer
cgaaatgagctctggacatgaatccacctcttttcaactg

SEQ ID NO: 33702 - DNA, 40 bp, Artificial Sequence
  Description of Artificial Sequence: Synthetic primer
ccagcaggacccacggagccaggagcaccttgatcaccat

SEQ ID NO: 33703 - DNA, 40 bp, Artificial Sequence
  Description of Artificial Sequence: Synthetic primer
ggtccggaacccgaatccgcacccggcaaccggagtggac

SEQ ID NO: 33704 - DNA, 40 bp, Artificial Sequence
  Description of Artificial Sequence: Synthetic primer
cagtcgctcaggtgccgtcgcgccgctcggcaggaaacgg

SEQ ID NO: 33705 - DNA, 40 bp, Artificial Sequence
  Description of Artificial Sequence: Synthetic primer
gaggccttccagctgctgtcttctggacaggctctgcttc

SEQ ID NO: 33706 - DNA, 40 bp, Artificial Sequence
  Description of Artificial Sequence: Synthetic primer
cttcagaaaacatcatagtcttcaaggacagaagaaaatc

SEQ ID NO: 33707 - DNA, 40 bp, Artificial Sequence
  Description of Artificial Sequence: Synthetic primer
caagttctgcagaacaatcacctttcaacctatctactga

SEQ ID NO: 33708 - DNA, 40 bp, Artificial Sequence
  Description of Artificial Sequence: Synthetic primer
acttagataatgaaacctcgttttaattgtgctttttgtg

SEQ ID NO: 33709 - DNA, 40 bp, Artificial Sequence
  Description of Artificial Sequence: Synthetic primer
tttctctgaagagaaaaacccagatcattgattgcataac

SEQ ID NO: 33710 - DNA, 40 bp, Artificial Sequence
  Description of Artificial Sequence: Synthetic primer
cgacagctccgggagagagtgggtaatacggtgacagctc

SEQ ID NO: 33711 - DNA, 40 bp, Artificial Sequence
  Description of Artificial Sequence: Synthetic primer
aagggggttgagaagcagcagttgccagagcagccttttg

SEQ ID NO: 33712 - DNA, 40 bp, Artificial Sequence
  Description of Artificial Sequence: Synthetic primer
tgtcttttaaaaagtgtgcttaacattgacacaataaatg

SEQ ID NO: 33713 - DNA, 40 bp, Artificial Sequence
  Description of Artificial Sequence: Synthetic primer
tccggggtggggtggagttgggtgtctcgacctcctcgac

SEQ ID NO: 33714 - DNA, 40 bp, Artificial Sequence
  Description of Artificial Sequence: Synthetic primer
gtgactcaacgcttggaccttcctgaccttcccctctcag

SEQ ID NO: 33715 - DNA, 40 bp, Artificial Sequence
  Description of Artificial Sequence: Synthetic primer
gcagccagggagccagccagcgccgcccagtgccgagtgc

SEQ ID NO: 33716 - DNA, 40 bp, Artificial Sequence
  Description of Artificial Sequence: Synthetic primer
ataagacatggactagtcctcattagcatgtttgcatagc

SEQ ID NO: 33717 - DNA, 40 bp, Artificial Sequence
  Description of Artificial Sequence: Synthetic primer
tcagaattactgtgtatttacttaatttcttattatgtgc

SEQ ID NO: 33718 - DNA, 40 bp, Artificial Sequence
  Description of Artificial Sequence: Synthetic primer
acaagcctcagaaaaagtttccaacaaaggcaagaggaag

SEQ ID NO: 33719 - DNA, 40 bp, Artificial Sequence
  Description of Artificial Sequence: Synthetic primer
ctgggtgcagatgcagtgtggctctggatagcaccttatg

SEQ ID NO: 33720 - DNA, 40 bp, Artificial Sequence
  Description of Artificial Sequence: Synthetic primer
ggtaagagtagaaccagggccgggtatcaattattgcttg

SEQ ID NO: 33721 - DNA, 40 bp, Artificial Sequence
  Description of Artificial Sequence: Synthetic primer
aaccctccttcactgctactggaaagttcttgcatacagc

SEQ ID NO: 33722 - DNA, 40 bp, Artificial Sequence
  Description of Artificial Sequence: Synthetic primer
aacctcgtgccctgactacggtgttatcatcaataagttc

SEQ ID NO: 33723 - DNA, 40 bp, Artificial Sequence
  Description of Artificial Sequence: Synthetic primer
gatataatacctttctaagggaaaaagttgtatcagtacc

SEQ ID NO: 33724 - DNA, 40 bp, Artificial Sequence
  Description of Artificial Sequence: Synthetic primer
ctggaaaagaaagaaagaaatgtacagagattaacaaaag

SEQ ID NO: 33725 - DNA, 40 bp, Artificial Sequence
  Description of Artificial Sequence: Synthetic primer
cagctgccctgaaagtaggggtggcggcggcggcgctgag

SEQ ID NO: 33726 - DNA, 40 bp, Artificial Sequence
  Description of Artificial Sequence: Synthetic primer
cttcagacaactgaatataaatttggtttctttctccttc

SEQ ID NO: 33727 - DNA, 40 bp, Artificial Sequence
  Description of Artificial Sequence: Synthetic primer
gccgggcgctgggggaccactggctggctccttagtgaag

SEQ ID NO: 33728 - DNA, 40 bp, Artificial Sequence
  Description of Artificial Sequence: Synthetic primer
tcgtggtccagctggccctcctggcaaggctggtgaagat

SEQ ID NO: 33729 - DNA, 40 bp, Artificial Sequence
  Description of Artificial Sequence: Synthetic primer
atggaatgataaaagtgaagaatcagctccgcttccttgc

SEQ ID NO: 33730 - DNA, 40 bp, Artificial Sequence
  Description of Artificial Sequence: Synthetic primer
cccgagcggcccagctcccgagccagccactcctcggaac

SEQ ID NO: 33731 - DNA, 40 bp, Artificial Sequence
  Description of Artificial Sequence: Synthetic primer
taacccccacttcctccactgcctcctggaccatagtttc

SEQ ID NO: 33732 - DNA, 40 bp, Artificial Sequence
  Description of Artificial Sequence: Synthetic primer
tgatcgccaccgttcttctggagcccgagccaacaaattc

SEQ ID NO: 33733 - DNA, 40 bp, Artificial Sequence
  Description of Artificial Sequence: Synthetic primer
gtgtagtgatactgtgtgaccacacgtccactgggtcttc

SEQ ID NO: 33734 - DNA, 40 bp, Artificial Sequence
  Description of Artificial Sequence: Synthetic primer
tggttcgtgtagaggggtcaaggtcatgtttaatggaaag

SEQ ID NO: 33735 - DNA, 40 bp, Artificial Sequence
  Description of Artificial Sequence: Synthetic primer
ctggccccagactttgttggggacatcttatgggaacatc

SEQ ID NO: 33736 - DNA, 40 bp, Artificial Sequence
  Description of Artificial Sequence: Synthetic primer
gccgagtcacctagccgggacgtcgtgggatccggaacag

SEQ ID NO: 33737 - DNA, 40 bp, Artificial Sequence
  Description of Artificial Sequence: Synthetic primer
tgcggaggctgaaactttacccggagccccagactgaagg

SEQ ID NO: 33738 - DNA, 40 bp, Artificial Sequence
  Description of Artificial Sequence: Synthetic primer
acagtggcctgttggggagcaaaggagctatgttgtacct

SEQ ID NO: 33739 - DNA, 40 bp, Artificial Sequence
  Description of Artificial Sequence: Synthetic primer
gttacttctaactaaaaccctcaaaataaatgatgaaaag

SEQ ID NO: 33740 - DNA, 40 bp, Artificial Sequence
  Description of Artificial Sequence: Synthetic primer
actcctcctcagaggtggacgtgtaatccgagccctgctg

SEQ ID NO: 33741 - DNA, 40 bp, Artificial Sequence
  Description of Artificial Sequence: Synthetic primer
tctccagcaggtccccgaggtacaaaatctgtcggattgg

SEQ ID NO: 33742 - DNA, 40 bp, Artificial Sequence
  Description of Artificial Sequence: Synthetic primer
gggcaagccttacatctgccagagctgtgggaaaggcttc

SEQ ID NO: 33743 - DNA, 40 bp, Artificial Sequence
  Description of Artificial Sequence: Synthetic primer
ggccctccgccttctcttcatgggaatgcactcttctctc

SEQ ID NO: 33744 - DNA, 40 bp, Artificial Sequence
  Description of Artificial Sequence: Synthetic primer
ccactgtctgctagcaaagaatgtactcaggtgacaccac

SEQ ID NO: 33745 - DNA, 40 bp, Artificial Sequence
  Description of Artificial Sequence: Synthetic primer
tttccatggattcttccttatcctctgaaggagaatttgc

SEQ ID NO: 33746 - DNA, 40 bp, Artificial Sequence
  Description of Artificial Sequence: Synthetic primer
ctgtagagaggaccccggtacatctgaaagccgggaaatg

SEQ ID NO: 33747 - DNA, 40 bp, Artificial Sequence
  Description of Artificial Sequence: Synthetic primer
ccggaccaatgaaagaaatcaaccttgctcctgacagctc

SEQ ID NO: 33748 - DNA, 40 bp, Artificial Sequence
  Description of Artificial Sequence: Synthetic primer
caaaaataaccccaaaggtggataccacacggtaaaaatc

SEQ ID NO: 33749 - DNA, 40 bp, Artificial Sequence
  Description of Artificial Sequence: Synthetic primer
ccagggggtcctctgagtcactctgcgtgccgtcctcgtg

SEQ ID NO: 33750 - DNA, 40 bp, Artificial Sequence
  Description of Artificial Sequence: Synthetic primer
aactccttattcttcatcaagccgtggcagtcatccttag

SEQ ID NO: 33751 - DNA, 40 bp, Artificial Sequence
  Description of Artificial Sequence: Synthetic primer
cagggaggctgtgacctgggggtcgctgctgtacacattc

SEQ ID NO: 33752 - DNA, 40 bp, Artificial Sequence
  Description of Artificial Sequence: Synthetic primer
agctgatcagtaggctggtgggggtcgcagcaacaacttc

SEQ ID NO: 33753 - DNA, 40 bp, Artificial Sequence
  Description of Artificial Sequence: Synthetic primer
gctgcaccagtggtgaaatcaatccagcatccacacatgg

SEQ ID NO: 33754 - DNA, 40 bp, Artificial Sequence
  Description of Artificial Sequence: Synthetic primer
ctgttttgatatgtgttctctatgagttaagtctgatttg

SEQ ID NO: 33755 - DNA, 40 bp, Artificial Sequence
  Description of Artificial Sequence: Synthetic primer
aagtccagtttcaagtaattcttccacagtctttaacttc

SEQ ID NO: 33756 - DNA, 40 bp, Artificial Sequence
  Description of Artificial Sequence: Synthetic primer
gccttcagaaggacagccggccttggtggaggtccacagc

SEQ ID NO: 33757 - DNA, 40 bp, Artificial Sequence
  Description of Artificial Sequence: Synthetic primer
ggtatctaggaaaaattaacaatgccacataacatgaaag

SEQ ID NO: 33758 - DNA, 40 bp, Artificial Sequence
  Description of Artificial Sequence: Synthetic primer
ggtgctgtaggtgcccctggtcctgctggagccacaggtg

SEQ ID NO: 33759 - DNA, 40 bp, Artificial Sequence
  Description of Artificial Sequence: Synthetic primer
ttggtttcaggaagcctaagcagccttaccagtggctgtc

SEQ ID NO: 33760 - DNA, 40 bp, Artificial Sequence
  Description of Artificial Sequence: Synthetic primer
ggggctctcggagctgccttccaacctcagcgtcttcacc

SEQ ID NO: 33761 - DNA, 40 bp, Artificial Sequence
  Description of Artificial Sequence: Synthetic primer
accaccagatgccaagagttcaaactcaacaatattatcc

SEQ ID NO: 33762 - DNA, 40 bp, Artificial Sequence
  Description of Artificial Sequence: Synthetic primer
aagatgacttaaaactaagcagcagtgaagacagtgatgg

SEQ ID NO: 33763 - DNA, 40 bp, Artificial Sequence
  Description of Artificial Sequence: Synthetic primer
aactgcagtcatctgctgtggttgaaatttcactttccag

SEQ ID NO: 33764 - DNA, 40 bp, Artificial Sequence
  Description of Artificial Sequence: Synthetic primer
ttctagcaactggttcctatgatgggtttgccagaatatg

SEQ ID NO: 33765 - DNA, 40 bp, Artificial Sequence
  Description of Artificial Sequence: Synthetic primer
ccagatggctgtgcacaagctggccaagagcatccctctg

SEQ ID NO: 33766 - DNA, 40 bp, Artificial Sequence
  Description of Artificial Sequence: Synthetic primer
aggatgtcatccggcagatcgaggcccaggagaagccaag

SEQ ID NO: 33767 - DNA, 40 bp, Artificial Sequence
  Description of Artificial Sequence: Synthetic primer
ggctccagtcggtctggaccacccccagtcccacctgctg

SEQ ID NO: 33768 - DNA, 40 bp, Artificial Sequence
  Description of Artificial Sequence: Synthetic primer
tttccctcataggagggcatgagccaccaagccctaattc

SEQ ID NO: 33769 - DNA, 40 bp, Artificial Sequence
  Description of Artificial Sequence: Synthetic primer
ccatcctgcaggacagatctgggcgtcacgggaagacgac

SEQ ID NO: 33770 - DNA, 40 bp, Artificial Sequence
  Description of Artificial Sequence: Synthetic primer
gatgatgacaaagacagaacatctaagaagatagacatgg

SEQ ID NO: 33771 - DNA, 40 bp, Artificial Sequence
  Description of Artificial Sequence: Synthetic primer
atacaataaataaatcttaatgcatggtggttttgtcctc

SEQ ID NO: 33772 - DNA, 40 bp, Artificial Sequence
  Description of Artificial Sequence: Synthetic primer
cagctgaatcctggaacctttttaattcaggcacagacag

SEQ ID NO: 33773 - DNA, 40 bp, Artificial Sequence
  Description of Artificial Sequence: Synthetic primer
cagcgaccggaccaggcccgagttctacctgaattcatac

SEQ ID NO: 33774 - DNA, 40 bp, Artificial Sequence
  Description of Artificial Sequence: Synthetic primer
ttctgcggaggtgcgcatcgggcccatgagactgacgcag

SEQ ID NO: 33775 - DNA, 40 bp, Artificial Sequence
  Description of Artificial Sequence: Synthetic primer
cagcagcacgtttggtggcctgcaccagcacgagcgtatg

SEQ ID NO: 33776 - DNA, 40 bp, Artificial Sequence
  Description of Artificial Sequence: Synthetic primer
cttaatgagtcaacagcaaagatagccacatcttcattag

SEQ ID NO: 33777 - DNA, 40 bp, Artificial Sequence
  Description of Artificial Sequence: Synthetic primer
catcacggaagtactgctcaaactgctggtccacatagtc

SEQ ID NO: 33778 - DNA, 40 bp, Artificial Sequence
  Description of Artificial Sequence: Synthetic primer
gccatgctaacgttatcacaagagaacaatggcagaaatg

SEQ ID NO: 33779 - DNA, 40 bp, Artificial Sequence
  Description of Artificial Sequence: Synthetic primer
ccaccctgtgggtgcagcacagctctctgaaagcaagaac

SEQ ID NO: 33780 - DNA, 40 bp, Artificial Sequence
  Description of Artificial Sequence: Synthetic primer
ggagaagtctctggtggtaaaaggcatcagattccaaaac

SEQ ID NO: 33781 - DNA, 40 bp, Artificial Sequence
  Description of Artificial Sequence: Synthetic primer
cagctggacaggagatggctgggaattcaaactttctgac

SEQ ID NO: 33782 - DNA, 40 bp, Artificial Sequence
  Description of Artificial Sequence: Synthetic primer
gcctcgaaccccaggccggagaagggggaccggagaccag

SEQ ID NO: 33783 - DNA, 40 bp, Artificial Sequence
  Description of Artificial Sequence: Synthetic primer
ggaacgggaacaagagaagtttaatctgaaagaagaactg

SEQ ID NO: 33784 - DNA, 40 bp, Artificial Sequence
  Description of Artificial Sequence: Synthetic primer
ggcccggctgcgtcacctgcgctccctctccctgcctgtc

SEQ ID NO: 33785 - DNA, 40 bp, Artificial Sequence
  Description of Artificial Sequence: Synthetic primer
ggagccctcaatggcatctttgtgctgggaaggagtatgg

SEQ ID NO: 33786 - DNA, 40 bp, Artificial Sequence
  Description of Artificial Sequence: Synthetic primer
cccgcctcccactcacctgccggtgcctgaaattatgtgc

SEQ ID NO: 33787 - DNA, 40 bp, Artificial Sequence
  Description of Artificial Sequence: Synthetic primer
acatcagccaagtaccttgagaagaaatttaacaaatcag

SEQ ID NO: 33788 - DNA, 40 bp, Artificial Sequence
  Description of Artificial Sequence: Synthetic primer
gccggtggcctcgttgtgaaccttgatgaacttgctgtgc

SEQ ID NO: 33789 - DNA, 40 bp, Artificial Sequence
  Description of Artificial Sequence: Synthetic primer
gtcgccgaccgctacgctgtctactggaacagcagcaacc

SEQ ID NO: 33790 - DNA, 40 bp, Artificial Sequence
  Description of Artificial Sequence: Synthetic primer
catttctttgcatggaattgtcatatttttccatttttgg

SEQ ID NO: 33791 - DNA, 40 bp, Artificial Sequence
  Description of Artificial Sequence: Synthetic primer
ccctcctggtccctgtacttggtggggtgggcggggttcg

SEQ ID NO: 33792 - DNA, 40 bp, Artificial Sequence
  Description of Artificial Sequence: Synthetic primer
ccatctctgccagggttaccaatttcacctctgagaccag

SEQ ID NO: 33793 - DNA, 40 bp, Artificial Sequence
  Description of Artificial Sequence: Synthetic primer
aagttgtttggctgtaagtcctctaggtccaaggattctc

SEQ ID NO: 33794 - DNA, 40 bp, Artificial Sequence
  Description of Artificial Sequence: Synthetic primer
caagtccctgcaggcctggaaagaccacaagctgcacatc

SEQ ID NO: 33795 - DNA, 40 bp, Artificial Sequence
  Description of Artificial Sequence: Synthetic primer
ggcactgctgctgccccacgtctccaacagctccttcagc

SEQ ID NO: 33796 - DNA, 40 bp, Artificial Sequence
  Description of Artificial Sequence: Synthetic primer
cttttaagagcttcctttgaccactgtctttttcttaccc

SEQ ID NO: 33797 - DNA, 40 bp, Artificial Sequence
  Description of Artificial Sequence: Synthetic primer
gctctcaatgttgaaacagaaatagaaattttgaaaaagc

SEQ ID NO: 33798 - DNA, 40 bp, Artificial Sequence
  Description of Artificial Sequence: Synthetic primer
tctgccttcttgacggcgaccaggtggctgctgcaggagc

SEQ ID NO: 33799 - DNA, 40 bp, Artificial Sequence
  Description of Artificial Sequence: Synthetic primer
ggcatcaaggccattgtgcaactggtgaatgagcgacagc

SEQ ID NO: 33800 - DNA, 40 bp, Artificial Sequence
  Description of Artificial Sequence: Synthetic primer
gaccagttccagctggggaggagtaaagtgttcatcaaag

SEQ ID NO: 33801 - DNA, 40 bp, Artificial Sequence
  Description of Artificial Sequence: Synthetic primer
gacaaatgttgatgcactgtagtcactgctgagttaatag

SEQ ID NO: 33802 - DNA, 40 bp, Artificial Sequence
  Description of Artificial Sequence: Synthetic primer
aattggttatcaattgcttccaattccagctcaggtaatc

SEQ ID NO: 33803 - DNA, 40 bp, Artificial Sequence
  Description of Artificial Sequence: Synthetic primer
tcccgcaggtaggcaaactcacagtgtgtggtgttttcaa

SEQ ID NO: 33804 - DNA, 40 bp, Artificial Sequence
  Description of Artificial Sequence: Synthetic primer
gattccatggacaaataatacagtgacagctataaatcag

SEQ ID NO: 33805 - DNA, 40 bp, Artificial Sequence
  Description of Artificial Sequence: Synthetic primer
tggagcagatgtcgtctctccagccactgtagcaactcac

SEQ ID NO: 33806 - DNA, 40 bp, Artificial Sequence
  Description of Artificial Sequence: Synthetic primer
aattcgggacctccagggatagttggacagaagggagacc

SEQ ID NO: 33807 - DNA, 40 bp, Artificial Sequence
  Description of Artificial Sequence: Synthetic primer
ggtcccggtcagttttcgcttccatctcccagacatggtg

SEQ ID NO: 33808 - DNA, 40 bp, Artificial Sequence
  Description of Artificial Sequence: Synthetic primer
gaggttcccgtaggtcatgaactcagtgatgatatagaac

SEQ ID NO: 33809 - DNA, 40 bp, Artificial Sequence
  Description of Artificial Sequence: Synthetic primer
acccgaagttcatttcctttgtctccctaaaactgaactg

SEQ ID NO: 33810 - DNA, 40 bp, Artificial Sequence
  Description of Artificial Sequence: Synthetic primer
atcctaataagagccctggattccatcattaacatttcag

SEQ ID NO: 33811 - DNA, 40 bp, Artificial Sequence
  Description of Artificial Sequence: Synthetic primer
caggctatttataactgctaactgcgcaaccttctttagg

SEQ ID NO: 33812 - DNA, 40 bp, Artificial Sequence
  Description of Artificial Sequence: Synthetic primer
accaacgtttcggaccgtatttctgtacaagctctatcac

SEQ ID NO: 33813 - DNA, 40 bp, Artificial Sequence
  Description of Artificial Sequence: Synthetic primer
ctatttgcctttagcacacatgtttgagcgaatggtgcag

SEQ ID NO: 33814 - DNA, 40 bp, Artificial Sequence
  Description of Artificial Sequence: Synthetic primer
aatgaatattctgtgaaatcaaagagaagcaggcaaaagg

SEQ ID NO: 33815 - DNA, 40 bp, Artificial Sequence
  Description of Artificial Sequence: Synthetic primer
cagcctgctggcaagacatctgaggacaggcgagaagtgg

SEQ ID NO: 33816 - DNA, 40 bp, Artificial Sequence
  Description of Artificial Sequence: Synthetic primer
ttcaagtggagacagtgaagtcaccccgtgtcctttttgc

SEQ ID NO: 33817 - DNA, 40 bp, Artificial Sequence
  Description of Artificial Sequence: Synthetic primer
gggacgcaggagataagacgccgggagccgtcaacgatgg

SEQ ID NO: 33818 - DNA, 40 bp, Artificial Sequence
  Description of Artificial Sequence: Synthetic primer
tttttgaagtggtgacatctagtcacattaaaataaaatc

SEQ ID NO: 33819 - DNA, 40 bp, Artificial Sequence
  Description of Artificial Sequence: Synthetic primer
gcttaaaaaggcagacttggcttggtgatagtttttcttg

SEQ ID NO: 33820 - DNA, 40 bp, Artificial Sequence
  Description of Artificial Sequence: Synthetic primer
ttctgcttttgcttgctcacaaaagcatatcatcatccac

SEQ ID NO: 33821 - DNA, 40 bp, Artificial Sequence
  Description of Artificial Sequence: Synthetic primer
tcaggagattggtatattgccctattatcccatagaattg

SEQ ID NO: 33822 - DNA, 40 bp, Artificial Sequence
  Description of Artificial Sequence: Synthetic primer
cctgcgacagctgggacaccgggttcagcatcaggttatc

SEQ ID NO: 33823 - DNA, 40 bp, Artificial Sequence
  Description of Artificial Sequence: Synthetic primer
ctggcaatgccagaggcaggtcagcagggggcggcgtcag

SEQ ID NO: 33824 - DNA, 40 bp, Artificial Sequence
  Description of Artificial Sequence: Synthetic primer
cagctaaaaggcatttgaacatatataacaaatcttacag

SEQ ID NO: 33825 - DNA, 40 bp, Artificial Sequence
  Description of Artificial Sequence: Synthetic primer
aggtgatccctaacttggcttaagtctttctgaagagatg

SEQ ID NO: 33826 - DNA, 40 bp, Artificial Sequence
  Description of Artificial Sequence: Synthetic primer
gctgcatagaaatccaaagtattttcctgagcctgaattg

SEQ ID NO: 33827 - DNA, 40 bp, Artificial Sequence
  Description of Artificial Sequence: Synthetic primer
tgttcactgccaaaactgtggcattttcattacaggagag

SEQ ID NO: 33828 - DNA, 40 bp, Artificial Sequence
  Description of Artificial Sequence: Synthetic primer
atggtaacagggcgtccacgaagaaacatttttacatagc

SEQ ID NO: 33829 - DNA, 40 bp, Artificial Sequence
  Description of Artificial Sequence: Synthetic primer
cctcgaggagagaaaggagaaagaggagatgttgggattc

SEQ ID NO: 33830 - DNA, 40 bp, Artificial Sequence
  Description of Artificial Sequence: Synthetic primer
gccccatggccatgctgcacattggctccaaccctgagag

SEQ ID NO: 33831 - DNA, 40 bp, Artificial Sequence
  Description of Artificial Sequence: Synthetic primer
taaacaggtacatttttacagtgttttcttatcaatttgc

SEQ ID NO: 33832 - DNA, 40 bp, Artificial Sequence
  Description of Artificial Sequence: Synthetic primer
cacatataaatacacagagtagtgttagctgatgtgagtg

SEQ ID NO: 33833 - DNA, 40 bp, Artificial Sequence
  Description of Artificial Sequence: Synthetic primer
gatttcacgtcaatggactctttcctcctgttcttatatc

SEQ ID NO: 33834 - DNA, 40 bp, Artificial Sequence
  Description of Artificial Sequence: Synthetic primer
tgtcgacacagagccacacgacaagtggacagcgcaattc

SEQ ID NO: 33835 - DNA, 40 bp, Artificial Sequence
  Description of Artificial Sequence: Synthetic primer
tgtttccactcattagaggagtgtaggccttccagtgcag

SEQ ID NO: 33836 - DNA, 40 bp, Artificial Sequence
  Description of Artificial Sequence: Synthetic primer
gtcatgattttaattgtattctgtagatggtgtcaatcag

SEQ ID NO: 33837 - DNA, 40 bp, Artificial Sequence
  Description of Artificial Sequence: Synthetic primer
aaaacctatattcaaaatatgttcatagagaaccaatacc

SEQ ID NO: 33838 - DNA, 40 bp, Artificial Sequence
  Description of Artificial Sequence: Synthetic primer
gggggtggaggcagggcacaggcggccatgacaggtcaac

SEQ ID NO: 33839 - DNA, 40 bp, Artificial Sequence
  Description of Artificial Sequence: Synthetic primer
tcaggtaccagacagtgatgagcagtttgttcctgatttc

SEQ ID NO: 33840 - DNA, 40 bp, Artificial Sequence
  Description of Artificial Sequence: Synthetic primer
ggcaatctttttctaagtttctcatttacttttggattag

SEQ ID NO: 33841 - DNA, 40 bp, Artificial Sequence
  Description of Artificial Sequence: Synthetic primer
ccatatcctctattatcttctccatacctactcacatcac

SEQ ID NO: 33842 - DNA, 40 bp, Artificial Sequence
  Description of Artificial Sequence: Synthetic primer
acgcttgaacagcatctaaatacattagaaggaaagaaac

SEQ ID NO: 33843 - DNA, 40 bp, Artificial Sequence
  Description of Artificial Sequence: Synthetic primer
cccaagtgagaaggaaatcaaagcccagcaggacaaactc

SEQ ID NO: 33844 - DNA, 40 bp, Artificial Sequence
  Description of Artificial Sequence: Synthetic primer
cccgatttcgcttcttcagtggtttacatgcatcagacag

SEQ ID NO: 33845 - DNA, 40 bp, Artificial Sequence
  Description of Artificial Sequence: Synthetic primer
cacgtttaattctagttactctctcttcagtgagccctac

SEQ ID NO: 33846 - DNA, 40 bp, Artificial Sequence
  Description of Artificial Sequence: Synthetic primer
tccataaatgtagctcttgtctggagatccttgtggtaac

SEQ ID NO: 33847 - DNA, 40 bp, Artificial Sequence
  Description of Artificial Sequence: Synthetic primer
ctctttcaagatctaagtcaattacaggaaacatggcttg

SEQ ID NO: 33848 - DNA, 40 bp, Artificial Sequence
  Description of Artificial Sequence: Synthetic primer
ggtccaacaactcctctctcaccaggtcgtccgggttttc

SEQ ID NO: 33849 - DNA, 40 bp, Artificial Sequence
  Description of Artificial Sequence: Synthetic primer
taaggaattttgtacagtctttgtgaaataaaataacgtg

SEQ ID NO: 33850 - DNA, 40 bp, Artificial Sequence
  Description of Artificial Sequence: Synthetic primer
gggttcaggaggaaaaaggaatcacaagatggagagaagc

SEQ ID NO: 33851 - DNA, 40 bp, Artificial Sequence
  Description of Artificial Sequence: Synthetic primer
atgttaataacgtgcttattttctctaagtgctattttgg

SEQ ID NO: 33852 - DNA, 40 bp, Artificial Sequence
  Description of Artificial Sequence: Synthetic primer
tgatctgaagaaccttttcatagaagctggatgttcagtg

SEQ ID NO: 33853 - DNA, 40 bp, Artificial Sequence
  Description of Artificial Sequence: Synthetic primer
cactggtccagccacttgcacgttggaatatctctcatgc

SEQ ID NO: 33854 - DNA, 40 bp, Artificial Sequence
  Description of Artificial Sequence: Synthetic primer
cggagctgggctttggcagccaccttggcagcggattttg

SEQ ID NO: 33855 - DNA, 40 bp, Artificial Sequence
  Description of Artificial Sequence: Synthetic primer
agctgcagcttcatgctaaaactggtcaaagtgctgactc

SEQ ID NO: 33856 - DNA, 40 bp, Artificial Sequence
  Description of Artificial Sequence: Synthetic primer
tccattttgcctgacaattgcaaatcagagcatacaaaat

SEQ ID NO: 33857 - DNA, 40 bp, Artificial Sequence
  Description of Artificial Sequence: Synthetic primer
ggaaggactcatgcctgtatatcactagatatcttatttc

SEQ ID NO: 33858 - DNA, 40 bp, Artificial Sequence
  Description of Artificial Sequence: Synthetic primer
gaggctgtagttgagggcatagaactgtgaggtcagatag

SEQ ID NO: 33859 - DNA, 40 bp, Artificial Sequence
  Description of Artificial Sequence: Synthetic primer
gtccgacacctgggctacaagccagaagagtacaagatgg

SEQ ID NO: 33860 - DNA, 40 bp, Artificial Sequence
  Description of Artificial Sequence: Synthetic primer
tgccgccgccaagcccggagtgcgccagcggccatggttc

SEQ ID NO: 33861 - DNA, 40 bp, Artificial Sequence
  Description of Artificial Sequence: Synthetic primer
tcatggtggcaaagatgctgcaagccctcgttatattttc

SEQ ID NO: 33862 - DNA, 40 bp, Artificial Sequence
  Description of Artificial Sequence: Synthetic primer
tttactaaaacattatttattttaactatatttaggactt

SEQ ID NO: 33863 - DNA, 40 bp, Artificial Sequence
  Description of Artificial Sequence: Synthetic primer
tccttgccaccctaatttgacatcaaaattctctcttgtg

SEQ ID NO: 33864 - DNA, 40 bp, Artificial Sequence
  Description of Artificial Sequence: Synthetic primer
ccagtttccctgtctgtgtacaaattaatcatgggctgtc

SEQ ID NO: 33865 - DNA, 40 bp, Artificial Sequence
  Description of Artificial Sequence: Synthetic primer
cactggtatcccacttaggggacttctgggggtcttatgg

SEQ ID NO: 33866 - DNA, 40 bp, Artificial Sequence
  Description of Artificial Sequence: Synthetic primer
cccagcaatgaggctgctggtgatgtgtggggtgacacag

SEQ ID NO: 33867 - DNA, 40 bp, Artificial Sequence
  Description of Artificial Sequence: Synthetic primer
ctgtctgagaattgtctcctgaatcacgatgaatcttgtg

SEQ ID NO: 33868 - DNA, 40 bp, Artificial Sequence
  Description of Artificial Sequence: Synthetic primer
agggtgccttcgtgacctcttacacctggagctactgcac

SEQ ID NO: 33869 - DNA, 40 bp, Artificial Sequence
  Description of Artificial Sequence: Synthetic primer
aacggaacgagacaagaatcagagcagtagcaagagaaag

SEQ ID NO: 33870 - DNA, 40 bp, Artificial Sequence
  Description of Artificial Sequence: Synthetic primer
cggaaaacagactccattgagaagaggttttgctttgatg

SEQ ID NO: 33871 - DNA, 40 bp, Artificial Sequence
  Description of Artificial Sequence: Synthetic primer
ctttcttcatcaaaattcttccctctagagacagctcctg

SEQ ID NO: 33872 - DNA, 40 bp, Artificial Sequence
  Description of Artificial Sequence: Synthetic primer
aaagtaatgactccattctcatcaggtgtccattttatac

SEQ ID NO: 33873 - DNA, 40 bp, Artificial Sequence
  Description of Artificial Sequence: Synthetic primer
ccaggtcatatgcacacccaggtaccaccttatccacagc

SEQ ID NO: 33874 - DNA, 40 bp, Artificial Sequence
  Description of Artificial Sequence: Synthetic primer
gaaaaggctttttcttacagacagatggcctttgattttg

SEQ ID NO: 33875 - DNA, 40 bp, Artificial Sequence
  Description of Artificial Sequence: Synthetic primer
ggtccttcccgatacattcctggctcttgtttgatgtctc

SEQ ID NO: 33876 - DNA, 40 bp, Artificial Sequence
  Description of Artificial Sequence: Synthetic primer
tcttttttgtcgatacgatcaatgtgaatatgaatttttg

SEQ ID NO: 33877 - DNA, 40 bp, Artificial Sequence
  Description of Artificial Sequence: Synthetic primer
tggggcttcttttcctcctcctttttcacggtgactggtg

SEQ ID NO: 33878 - DNA, 40 bp, Artificial Sequence
  Description of Artificial Sequence: Synthetic primer
agattgatttcgcagacacagtcaccaagtatgacaggag

SEQ ID NO: 33879 - DNA, 40 bp, Artificial Sequence
  Description of Artificial Sequence: Synthetic primer
ctgatgaatcttcctccattcctacaggtctccatgtcag

SEQ ID NO: 33880 - DNA, 40 bp, Artificial Sequence
  Description of Artificial Sequence: Synthetic primer
aagcctttcaacctagcctgactcatggtgaactgccaag

SEQ ID NO: 33881 - DNA, 40 bp, Artificial Sequence
  Description of Artificial Sequence: Synthetic primer
gaacactctgggttttacagcattaacctgcctaaccttc

SEQ ID NO: 33882 - DNA, 40 bp, Artificial Sequence
  Description of Artificial Sequence: Synthetic primer
gctccaaagacatctatctgataattcccctcatgtttac

SEQ ID NO: 33883 - DNA, 40 bp, Artificial Sequence
  Description of Artificial Sequence: Synthetic primer
gcatagagtcgtgggttatttacaagtgacatacttttcc

SEQ ID NO: 33884 - DNA, 40 bp, Artificial Sequence
  Description of Artificial Sequence: Synthetic primer
ggccaccggggtgctgccgttcgtgcgtggcgtggacctc

SEQ ID NO: 33885 - DNA, 40 bp, Artificial Sequence
  Description of Artificial Sequence: Synthetic primer
attaactttaggggaagtctaaatttacattggataactc

SEQ ID NO: 33886 - DNA, 40 bp, Artificial Sequence
  Description of Artificial Sequence: Synthetic primer
ggttcaccaggctcaccagcaggtccttggaaaccttgag

SEQ ID NO: 33887 - DNA, 40 bp, Artificial Sequence
  Description of Artificial Sequence: Synthetic primer
cagggagagatggagtacctggaggacctggagaaactgg

SEQ ID NO: 33888 - DNA, 40 bp, Artificial Sequence
  Description of Artificial Sequence: Synthetic primer
gcccgggccaagtcctaacgaagagaacaatggcaaaagc

SEQ ID NO: 33889 - DNA, 40 bp, Artificial Sequence
  Description of Artificial Sequence: Synthetic primer
gttgaaaggataaggaggaggggtggcttttatggacttc

SEQ ID NO: 33890 - DNA, 40 bp, Artificial Sequence
  Description of Artificial Sequence: Synthetic primer
aatgcagctttggacaagggacacaaagcctcagagaaac

SEQ ID NO: 33891 - DNA, 40 bp, Artificial Sequence
  Description of Artificial Sequence: Synthetic primer
aaaagagagacattggggtgctttaaatgtatagtatctt

SEQ ID NO: 33892 - DNA, 40 bp, Artificial Sequence
  Description of Artificial Sequence: Synthetic primer
ggaccgcacatactcgagacacccagctctgaggagcaac

SEQ ID NO: 33893 - DNA, 40 bp, Artificial Sequence
  Description of Artificial Sequence: Synthetic primer
gacagacaggtggaactgccagtgtagagggaattctaag

SEQ ID NO: 33894 - DNA, 40 bp, Artificial Sequence
  Description of Artificial Sequence: Synthetic primer
ggcacagctctcctattgaaacttgcccagatgttctcag

SEQ ID NO: 33895 - DNA, 40 bp, Artificial Sequence
  Description of Artificial Sequence: Synthetic primer
tagaagtataaaactcctttagtggccccagttaaaacac

SEQ ID NO: 33896 - DNA, 40 bp, Artificial Sequence
  Description of Artificial Sequence: Synthetic primer
gcgtgtgtataaaaagtgctcaaataaactaacatagtgc

SEQ ID NO: 33897 - DNA, 40 bp, Artificial Sequence
  Description of Artificial Sequence: Synthetic primer
aggattccacaaatcaatgctatctaactgatgaagaacc

SEQ ID NO: 33898 - DNA, 40 bp, Artificial Sequence
  Description of Artificial Sequence: Synthetic primer
ggcagcagcagccgcagcaccagcaccaccaccacctgct

SEQ ID NO: 33899 - DNA, 40 bp, Artificial Sequence
  Description of Artificial Sequence: Synthetic primer
gttcctgctggagtggagtgtctggggctcctggtacgac

SEQ ID NO: 33900 - DNA, 40 bp, Artificial Sequence
  Description of Artificial Sequence: Synthetic primer
tcagacactggtgttgagacattaggcaagataaactttg

SEQ ID NO: 33901 - DNA, 40 bp, Artificial Sequence
  Description of Artificial Sequence: Synthetic primer
gaggcacccaggcctagacagctcctgggcagccagagtc

SEQ ID NO: 33902 - DNA, 40 bp, Artificial Sequence
  Description of Artificial Sequence: Synthetic primer
catcaccaacagttctgggatttctccgggcagctctagg

SEQ ID NO: 33903 - DNA, 40 bp, Artificial Sequence
  Description of Artificial Sequence: Synthetic primer
tcctggagtaccaaaaagtgtagttgtactgcaggggatg

SEQ ID NO: 33904 - DNA, 40 bp, Artificial Sequence
  Description of Artificial Sequence: Synthetic primer
gctggagaagaagatagaacttgacgtgaaatatatgaac

SEQ ID NO: 33905 - DNA, 40 bp, Artificial Sequence
  Description of Artificial Sequence: Synthetic primer
tgtgtagctccactaaacctaatgggaaataaacaaattc

SEQ ID NO: 33906 - DNA, 40 bp, Artificial Sequence
  Description of Artificial Sequence: Synthetic primer
gccagggttgttgttggtaaaattgttataggagtcttgg

SEQ ID NO: 33907 - DNA, 40 bp, Artificial Sequence
  Description of Artificial Sequence: Synthetic primer
cgaagtgaccatgggatcttccactctcggaccagtctcc

SEQ ID NO: 33908 - DNA, 40 bp, Artificial Sequence
  Description of Artificial Sequence: Synthetic primer
ctgtgggtctaatgaagccagcactgtgagtggtgaaaac

SEQ ID NO: 33909 - DNA, 40 bp, Artificial Sequence
  Description of Artificial Sequence: Synthetic primer
tggaggaagccttccacggcaagttctacgaggctgactg

SEQ ID NO: 33910 - DNA, 40 bp, Artificial Sequence
  Description of Artificial Sequence: Synthetic primer
tcatatactgtatatataaaaatcttgagatggtagaaac

SEQ ID NO: 33911 - DNA, 40 bp, Artificial Sequence
  Description of Artificial Sequence: Synthetic primer
ctggaagacgtacctttgttggaagacatacctttgttgg

SEQ ID NO: 33912 - DNA, 40 bp, Artificial Sequence
  Description of Artificial Sequence: Synthetic primer
tgggcaagtggtcaaagactggactagtggtgtatgattc

SEQ ID NO: 33913 - DNA, 40 bp, Artificial Sequence
  Description of Artificial Sequence: Synthetic primer
gcgaatggccccataagtaactgataacagggaaaatgtc

SEQ ID NO: 33914 - DNA, 40 bp, Artificial Sequence
  Description of Artificial Sequence: Synthetic primer
aacaatgcccatttcccactgggccctcaatttccctgaa

SEQ ID NO: 33915 - DNA, 40 bp, Artificial Sequence
  Description of Artificial Sequence: Synthetic primer
atttcactaaggtaggaataacacccatattgataagctg

SEQ ID NO: 33916 - DNA, 40 bp, Artificial Sequence
  Description of Artificial Sequence: Synthetic primer
agggaaaacttggtgatatggtccttgatcttcatcttgc

SEQ ID NO: 33917 - DNA, 40 bp, Artificial Sequence
  Description of Artificial Sequence: Synthetic primer
tacccacacgtctttatctctagaagctgtgatgtatgtg

SEQ ID NO: 33918 - DNA, 40 bp, Artificial Sequence
  Description of Artificial Sequence: Synthetic primer
caaacccggagtctgtgaactctgtattacgtgatgtacc

SEQ ID NO: 33919 - DNA, 40 bp, Artificial Sequence
  Description of Artificial Sequence: Synthetic primer
cagcttgaacctgcttgtttgaaagtgtggtttcattgtg

SEQ ID NO: 33920 - DNA, 40 bp, Artificial Sequence
  Description of Artificial Sequence: Synthetic primer
cctccgggactcggtgctgcacacgctccagcacatacat

SEQ ID NO: 33921 - DNA, 40 bp, Artificial Sequence
  Description of Artificial Sequence: Synthetic primer
aggcaggctgagcaggacggaggagacggccgacaacagc

SEQ ID NO: 33922 - DNA, 40 bp, Artificial Sequence
  Description of Artificial Sequence: Synthetic primer
cgggctgccgctctcgccatcggcgtggcagcccgagaac

SEQ ID NO: 33923 - DNA, 40 bp, Artificial Sequence
  Description of Artificial Sequence: Synthetic primer
acactgtgtcagcagccatgtctacaacacagataagtct

SEQ ID NO: 33924 - DNA, 40 bp, Artificial Sequence
  Description of Artificial Sequence: Synthetic primer
gtttgccacttcgtcgggcctcaaacaacacaagcacatc

SEQ ID NO: 33925 - DNA, 40 bp, Artificial Sequence
  Description of Artificial Sequence: Synthetic primer
ctttagtcatcttggtaaaacatgactttattttgttaag

SEQ ID NO: 33926 - DNA, 40 bp, Artificial Sequence
  Description of Artificial Sequence: Synthetic primer
ggtgtcctccattatgtcttgtaccaggagaaatgccttc

SEQ ID NO: 33927 - DNA, 40 bp, Artificial Sequence
  Description of Artificial Sequence: Synthetic primer
tcttttccctgaattaattggaactgaagaaataatcaag

SEQ ID NO: 33928 - DNA, 40 bp, Artificial Sequence
  Description of Artificial Sequence: Synthetic primer
cagcagcactgtcaccacaaatggaagattcaaagagagg

SEQ ID NO: 33929 - DNA, 40 bp, Artificial Sequence
  Description of Artificial Sequence: Synthetic primer
tggccatatccctggaactgctgaggttgttgaggtccag

SEQ ID NO: 33930 - DNA, 40 bp, Artificial Sequence
  Description of Artificial Sequence: Synthetic primer
ccgcagcatgcgccccgcctgctaagtcgccgccgtctcg

SEQ ID NO: 33931 - DNA, 40 bp, Artificial Sequence
  Description of Artificial Sequence: Synthetic primer
aaatggtgcaataaaagcaactttcaatatataaacagac

SEQ ID NO: 33932 - DNA, 40 bp, Artificial Sequence
  Description of Artificial Sequence: Synthetic primer
tggtattttaaatggaagtgtcttgtcctaactaacaagg

SEQ ID NO: 33933 - DNA, 40 bp, Artificial Sequence
  Description of Artificial Sequence: Synthetic primer
cgtaggcatacatcacctccttgttgaaccttgcgctatc

SEQ ID NO: 33934 - DNA, 40 bp, Artificial Sequence
  Description of Artificial Sequence: Synthetic primer
aagagagttgtgagtctctttcctgtttacctccagtgtc

SEQ ID NO: 33935 - DNA, 40 bp, Artificial Sequence
  Description of Artificial Sequence: Synthetic primer
gttccatcatatctgtgggatagtaattcatgtaagacac

SEQ ID NO: 33936 - DNA, 40 bp, Artificial Sequence
  Description of Artificial Sequence: Synthetic primer
ctcaattgttgttcgctggagcagaccccaggctcccatc

SEQ ID NO: 33937 - DNA, 40 bp, Artificial Sequence
  Description of Artificial Sequence: Synthetic primer
gtgggggaagcagaaaaacaagcctgacatgaactatgag

SEQ ID NO: 33938 - DNA, 40 bp, Artificial Sequence
  Description of Artificial Sequence: Synthetic primer
agccacgttggtgaagtttgcgatgctgcctccaatgatg

SEQ ID NO: 33939 - DNA, 40 bp, Artificial Sequence
  Description of Artificial Sequence: Synthetic primer
aaacctccaggaagcctcttaggagggctgtgtagtgatg

SEQ ID NO: 33940 - DNA, 40 bp, Artificial Sequence
  Description of Artificial Sequence: Synthetic primer
cttcgttctcatattttataccattttctgtgtgtacagg

SEQ ID NO: 33941 - DNA, 40 bp, Artificial Sequence
  Description of Artificial Sequence: Synthetic primer
aagccgtggagctccccgtcctgctgcactggtcccttgg

SEQ ID NO: 33942 - DNA, 40 bp, Artificial Sequence
  Description of Artificial Sequence: Synthetic primer
gggcggtgaccgtggtctgaaagaaggctgggttgaactg

SEQ ID NO: 33943 - DNA, 40 bp, Artificial Sequence
  Description of Artificial Sequence: Synthetic primer
atggtaggatgctctttgactacctggcggacaagcatgg

SEQ ID NO: 33944 - DNA, 40 bp, Artificial Sequence
  Description of Artificial Sequence: Synthetic primer
caaggacagccgtgttggttggactctgaattttgaattg

SEQ ID NO: 33945 - DNA, 40 bp, Artificial Sequence
  Description of Artificial Sequence: Synthetic primer
ttcagtcccaggcgagttctggttatgcaagtttattatc

SEQ ID NO: 33946 - DNA, 40 bp, Artificial Sequence
  Description of Artificial Sequence: Synthetic primer
gcccgacaccgcgttgaccagcacagttcccaggagacac

SEQ ID NO: 33947 - DNA, 40 bp, Artificial Sequence
  Description of Artificial Sequence: Synthetic primer
aaggcaccgggggctcctgctcgaggccactgtgacgttc

SEQ ID NO: 33948 - DNA, 40 bp, Artificial Sequence
  Description of Artificial Sequence: Synthetic primer
ttgaccagaagccaaaggatttaaaggtcttttaattgtc

SEQ ID NO: 33949 - DNA, 40 bp, Artificial Sequence
  Description of Artificial Sequence: Synthetic primer
accagctggtcccacgtggtcgcccccaccctacacacac

SEQ ID NO: 33950 - DNA, 40 bp, Artificial Sequence
  Description of Artificial Sequence: Synthetic primer
gcacactcagagttttctttctctttaaatctgttcatgc

SEQ ID NO: 33951 - DNA, 40 bp, Artificial Sequence
  Description of Artificial Sequence: Synthetic primer
tggcttctgctctcaggaacaggaagtggctctgatgttg

SEQ ID NO: 33952 - DNA, 40 bp, Artificial Sequence
  Description of Artificial Sequence: Synthetic primer
tcctgtgagcaggtccaggctcccactggggtccacgatg

SEQ ID NO: 33953 - DNA, 40 bp, Artificial Sequence
  Description of Artificial Sequence: Synthetic primer
gctgttgatggatacgtgaagccacagatcaagcaagtgg

SEQ ID NO: 33954 - DNA, 40 bp, Artificial Sequence
  Description of Artificial Sequence: Synthetic primer
gctgagtatttcctaagtagggactgacaccagctgatcc

SEQ ID NO: 33955 - DNA, 40 bp, Artificial Sequence
  Description of Artificial Sequence: Synthetic primer
gccattcctggtggagttcctggaggagtcttttatccag

SEQ ID NO: 33956 - DNA, 40 bp, Artificial Sequence
  Description of Artificial Sequence: Synthetic primer
cagatgccccccagcctgggccagatgagcctgccctttg

SEQ ID NO: 33957 - DNA, 40 bp, Artificial Sequence
  Description of Artificial Sequence: Synthetic primer
tagcagtgcaagttcaaaagtaagtccaatcatttctgtg

SEQ ID NO: 33958 - DNA, 40 bp, Artificial Sequence
  Description of Artificial Sequence: Synthetic primer
gtacatacaaccctctgcaaaatctttcagtgtagtcctc

SEQ ID NO: 33959 - DNA, 40 bp, Artificial Sequence
  Description of Artificial Sequence: Synthetic primer
gcctccctcctgccaagtttgagggcaaggctaagaaatg

SEQ ID NO: 33960 - DNA, 40 bp, Artificial Sequence
  Description of Artificial Sequence: Synthetic primer
aaggaagtgaacaccacttcaccagatagtgagtcacagg

SEQ ID NO: 33961 - DNA, 40 bp, Artificial Sequence
  Description of Artificial Sequence: Synthetic primer
tgaccttcttggtgttttcggttttcccggctccagactc

SEQ ID NO: 33962 - DNA, 40 bp, Artificial Sequence
  Description of Artificial Sequence: Synthetic primer
cctcaagagaggcaacaagctctacctcaaatttttcatc

SEQ ID NO: 33963 - DNA, 40 bp, Artificial Sequence
  Description of Artificial Sequence: Synthetic primer
cttcctcttacctggaagttgttcagtcagccagcaggag

SEQ ID NO: 33964 - DNA, 40 bp, Artificial Sequence
  Description of Artificial Sequence: Synthetic primer
catagttccaaaaccacttccctagaacagtgtaatatag

SEQ ID NO: 33965 - DNA, 40 bp, Artificial Sequence
  Description of Artificial Sequence: Synthetic primer
tgctgcttcagctccttccaaggtggtaggcatttcagtg

SEQ ID NO: 33966 - DNA, 40 bp, Artificial Sequence
  Description of Artificial Sequence: Synthetic primer
ggacgccatctcccaggtccaggctgctgtcggtggtcag

SEQ ID NO: 33967 - DNA, 40 bp, Artificial Sequence
  Description of Artificial Sequence: Synthetic primer
agttctgggcagccaccggaagcaccggccctcagtcctc

SEQ ID NO: 33968 - DNA, 40 bp, Artificial Sequence
  Description of Artificial Sequence: Synthetic primer
ttaagtcaagcctatatttctacaattcattgagtcaagc

SEQ ID NO: 33969 - DNA, 40 bp, Artificial Sequence
  Description of Artificial Sequence: Synthetic primer
caggtgcagcctctgcactaccttcagacggggcaaaggg

SEQ ID NO: 33970 - DNA, 40 bp, Artificial Sequence
  Description of Artificial Sequence: Synthetic primer
cttaataatgaacccacatgcctctaccaatggacagctc

SEQ ID NO: 33971 - DNA, 40 bp, Artificial Sequence
  Description of Artificial Sequence: Synthetic primer
ccattgctttcccttcgacccccaggagacactcgttcag

SEQ ID NO: 33972 - DNA, 40 bp, Artificial Sequence
  Description of Artificial Sequence: Synthetic primer
gtttggtgattagtgtatctatgatcactttctgattctg

SEQ ID NO: 33973 - DNA, 40 bp, Artificial Sequence
  Description of Artificial Sequence: Synthetic primer
tttagcattatcttctcaactgttctctactgtggtgagg

SEQ ID NO: 33974 - DNA, 40 bp, Artificial Sequence
  Description of Artificial Sequence: Synthetic primer
atgatatccctgaccgaaggttcatgcatgatgcatcatc

SEQ ID NO: 33975 - DNA, 40 bp, Artificial Sequence
  Description of Artificial Sequence: Synthetic primer
gaggaggtggtgaccgtggagacgtggcaggagggctcac

SEQ ID NO: 33976 - DNA, 40 bp, Artificial Sequence
  Description of Artificial Sequence: Synthetic primer
gccactggctgttccaccctcaatgtaggagatgtcgttg

SEQ ID NO: 33977 - DNA, 40 bp, Artificial Sequence
  Description of Artificial Sequence: Synthetic primer
gtcagagctctcaatcggatcctgatgtgagcatttctgg

SEQ ID NO: 33978 - DNA, 40 bp, Artificial Sequence
  Description of Artificial Sequence: Synthetic primer
gacatggtgacagagaagcaggcgcgggagctgagtgtgc

SEQ ID NO: 33979 - DNA, 40 bp, Artificial Sequence
  Description of Artificial Sequence: Synthetic primer
aggtgggagattggcaatcaaaaatcccattggaatattc

SEQ ID NO: 33980 - DNA, 40 bp, Artificial Sequence
  Description of Artificial Sequence: Synthetic primer
acctgccactgcttcctgggtttcctgggccccgactgtg

SEQ ID NO: 33981 - DNA, 40 bp, Artificial Sequence
  Description of Artificial Sequence: Synthetic primer
cttcagtgtcatcacagttctggagtccgatgctgtaggc

SEQ ID NO: 33982 - DNA, 40 bp, Artificial Sequence
  Description of Artificial Sequence: Synthetic primer
ccggaccatgtaccaggtgttccgccgtgggcttagcatc

SEQ ID NO: 33983 - DNA, 40 bp, Artificial Sequence
  Description of Artificial Sequence: Synthetic primer
gtctgccacgtggacgcccctggccagcaggacggcgcag

SEQ ID NO: 33984 - DNA, 40 bp, Artificial Sequence
  Description of Artificial Sequence: Synthetic primer
gggggacagcctgggagaggcagagattcatggccagcag

SEQ ID NO: 33985 - DNA, 40 bp, Artificial Sequence
  Description of Artificial Sequence: Synthetic primer
ggtgacatggaaaaggagccaggaattcccagtttgacac

SEQ ID NO: 33986 - DNA, 40 bp, Artificial Sequence
  Description of Artificial Sequence: Synthetic primer
gctggagcatgccatctccccatctgcggccgatgtgctg

SEQ ID NO: 33987 - DNA, 40 bp, Artificial Sequence
  Description of Artificial Sequence: Synthetic primer
cagacccagaaaaagtgtaacagaacagaggaactcttgg

SEQ ID NO: 33988 - DNA, 40 bp, Artificial Sequence
  Description of Artificial Sequence: Synthetic primer
tccagatgtgggatcttcgatttgcttcctctccacttcg

SEQ ID NO: 33989 - DNA, 40 bp, Artificial Sequence
  Description of Artificial Sequence: Synthetic primer
gccccaggggctccactgattctcagtggcctcccccaac

SEQ ID NO: 33990 - DNA, 40 bp, Artificial Sequence
  Description of Artificial Sequence: Synthetic primer
ctgcttaagttggcaagacactccaagtttggcatgaaag

SEQ ID NO: 33991 - DNA, 40 bp, Artificial Sequence
  Description of Artificial Sequence: Synthetic primer
gcttttgtagatggaagggcagtttctttctctgagtttc

SEQ ID NO: 33992 - DNA, 40 bp, Artificial Sequence
  Description of Artificial Sequence: Synthetic primer
ctaggcatctatttatgtataaataataacagagccgacg

SEQ ID NO: 33993 - DNA, 40 bp, Artificial Sequence
  Description of Artificial Sequence: Synthetic primer
gtgttaatactagttgtgaccttagtgtttctgtgcatgg

SEQ ID NO: 33994 - DNA, 40 bp, Artificial Sequence
  Description of Artificial Sequence: Synthetic primer
gggaagcttcttcatgagggcagacaagaggaggcaccac

SEQ ID NO: 33995 - DNA, 40 bp, Artificial Sequence
  Description of Artificial Sequence: Synthetic primer
ctgccagagtgctccacagggacttgaggcatgcagttgg

SEQ ID NO: 33996 - DNA, 40 bp, Artificial Sequence
  Description of Artificial Sequence: Synthetic primer
cattacaacttcaagccttattacagaactatcactgtgc

SEQ ID NO: 33997 - DNA, 40 bp, Artificial Sequence
  Description of Artificial Sequence: Synthetic primer
cacccgcacagctgtgctcttcacactgcgctcatctcgc

SEQ ID NO: 33998 - DNA, 40 bp, Artificial Sequence
  Description of Artificial Sequence: Synthetic primer
agcagcagaggtgaagcctttaatgacggggtaggaaatg

SEQ ID NO: 33999 - DNA, 40 bp, Artificial Sequence
  Description of Artificial Sequence: Synthetic primer
tcatgcttcagatgacgaaaatgccacatcagattaaatg

SEQ ID NO: 34000 - DNA, 40 bp, Artificial Sequence
  Description of Artificial Sequence: Synthetic primer
cataaaacgggcaacaaaactcaaaaagaactttagattg

SEQ ID NO: 34001 - DNA, 40 bp, Artificial Sequence
  Description of Artificial Sequence: Synthetic primer
gtccagaatgtacacgcagcgcgtgtccagcagactctgc

SEQ ID NO: 34002 - DNA, 40 bp, Artificial Sequence
  Description of Artificial Sequence: Synthetic primer
tctacagccggcagcatatggagcgttaccgtggcgtcag

SEQ ID NO: 34003 - DNA, 40 bp, Artificial Sequence
  Description of Artificial Sequence: Synthetic primer
agagacagttaatagattttgtgtttttcccattttgaac

SEQ ID NO: 34004 - DNA, 40 bp, Artificial Sequence
  Description of Artificial Sequence: Synthetic primer
gggacactcgtgtgggcctgtttgccgtctgtgacattcc

SEQ ID NO: 34005 - DNA, 40 bp, Artificial Sequence
  Description of Artificial Sequence: Synthetic primer
ttcaccaccaggttccccagcagtctcgaaaggacctcag

SEQ ID NO: 34006 - DNA, 40 bp, Artificial Sequence
  Description of Artificial Sequence: Synthetic primer
caggaatggagcctgtctcaggaaggccagctgcaggtcc

SEQ ID NO: 34007 - DNA, 40 bp, Artificial Sequence
  Description of Artificial Sequence: Synthetic primer
atggcttgatggagcagggcggggggctcctgagtggggg

SEQ ID NO: 34008 - DNA, 40 bp, Artificial Sequence
  Description of Artificial Sequence: Synthetic primer
accatctcaagtcgaagagacccaacccctgtgcctacac

SEQ ID NO: 34009 - DNA, 40 bp, Artificial Sequence
  Description of Artificial Sequence: Synthetic primer
gactaaattttatatttcttgtcctctaaatattttgata

SEQ ID NO: 34010 - DNA, 40 bp, Artificial Sequence
  Description of Artificial Sequence: Synthetic primer
taactctaaaaggaatgtatttgtgcctacctcattcgtg

SEQ ID NO: 34011 - DNA, 40 bp, Artificial Sequence
  Description of Artificial Sequence: Synthetic primer
cactcgccacagaatcgttccacgcaggcgcacgggtagc

SEQ ID NO: 34012 - DNA, 40 bp, Artificial Sequence
  Description of Artificial Sequence: Synthetic primer
gttgagttaaagaccaactccagacttgatgttgctgagc

SEQ ID NO: 34013 - DNA, 40 bp, Artificial Sequence
  Description of Artificial Sequence: Synthetic primer
agctcttggaaaagcaccaaagggagcttcaggagggaag

SEQ ID NO: 34014 - DNA, 40 bp, Artificial Sequence
  Description of Artificial Sequence: Synthetic primer
ttcctctgctcgcggttagcccgtcagtccctgctctgtg

SEQ ID NO: 34015 - DNA, 40 bp, Artificial Sequence
  Description of Artificial Sequence: Synthetic primer
tttagagcggatagatggcttggacttctgcagagatagc

SEQ ID NO: 34016 - DNA, 40 bp, Artificial Sequence
  Description of Artificial Sequence: Synthetic primer
ctttttgtttactcccactcaactgtatgttctatgtagg

SEQ ID NO: 34017 - DNA, 40 bp, Artificial Sequence
  Description of Artificial Sequence: Synthetic primer
gaccaggcggcatgtcctaagtgacctggaagatgatgag

SEQ ID NO: 34018 - DNA, 40 bp, Artificial Sequence
  Description of Artificial Sequence: Synthetic primer
acttacctttgcagttttacagaccctgggagctgctttg

SEQ ID NO: 34019 - DNA, 40 bp, Artificial Sequence
  Description of Artificial Sequence: Synthetic primer
tgtgatcccaggctccaagagtccacccttcccagctcag

SEQ ID NO: 34020 - DNA, 40 bp, Artificial Sequence
  Description of Artificial Sequence: Synthetic primer
gcaccaactcttgattcttctaagcctcggagaacaaagc

SEQ ID NO: 34021 - DNA, 40 bp, Artificial Sequence
  Description of Artificial Sequence: Synthetic primer
gagccatgccaaagccccgtttaccagtgccactcacctg

SEQ ID NO: 34022 - DNA, 40 bp, Artificial Sequence
  Description of Artificial Sequence: Synthetic primer
gacagttggcaagaaaaccccgaggagccctgttccaaag

SEQ ID NO: 34023 - DNA, 40 bp, Artificial Sequence
  Description of Artificial Sequence: Synthetic primer
caggcaacccttgtgtgtttgcagcgcaagaggagctcag

SEQ ID NO: 34024 - DNA, 40 bp, Artificial Sequence
  Description of Artificial Sequence: Synthetic primer
acaatacgattattcaatgtggtgactggggtagactgtg

SEQ ID NO: 34025 - DNA, 40 bp, Artificial Sequence
  Description of Artificial Sequence: Synthetic primer
ggctatgcaaggagtgaatgtttcagggtggagaagaatc

SEQ ID NO: 34026 - DNA, 40 bp, Artificial Sequence
  Description of Artificial Sequence: Synthetic primer
gtacagatgaaccagaatgaatgtttatcttctcagaaac

SEQ ID NO: 34027 - DNA, 40 bp, Artificial Sequence
  Description of Artificial Sequence: Synthetic primer
gtccaccatgactgtattggtccccgtaatagtcttcctg

SEQ ID NO: 34028 - DNA, 40 bp, Artificial Sequence
  Description of Artificial Sequence: Synthetic primer
ttttaggtctcaaagaaatctttacatttctggattttcc

SEQ ID NO: 34029 - DNA, 40 bp, Artificial Sequence
  Description of Artificial Sequence: Synthetic primer
attaaatagactcaatttactcacattgttgaaaatcaaa

SEQ ID NO: 34030 - DNA, 40 bp, Artificial Sequence
  Description of Artificial Sequence: Synthetic primer
tgctgcaacatactgtctagcacaatatatgtgcctgttc

SEQ ID NO: 34031 - DNA, 40 bp, Artificial Sequence
  Description of Artificial Sequence: Synthetic primer
tccagatataaaagcatgtaaatctgcaaaagataattcc

SEQ ID NO: 34032 - DNA, 40 bp, Artificial Sequence
  Description of Artificial Sequence: Synthetic primer
gccacagcccactaaagaggagcccaaagtcccgcccatc

SEQ ID NO: 34033 - DNA, 40 bp, Artificial Sequence
  Description of Artificial Sequence: Synthetic primer
ctgctataagtacaaccctcctgaccatgaggtggtggcc

SEQ ID NO: 34034 - DNA, 40 bp, Artificial Sequence
  Description of Artificial Sequence: Synthetic primer
agaacacagtggtctcccctgtccgggggcggctttttcc

SEQ ID NO: 34035 - DNA, 40 bp, Artificial Sequence
  Description of Artificial Sequence: Synthetic primer
tcgactttccccaacacctgcggcatcttctgggtgactg

SEQ ID NO: 34036 - DNA, 40 bp, Artificial Sequence
  Description of Artificial Sequence: Synthetic primer
ttaaatggcaatgtgttcatagtcagcaataaaattaaac

SEQ ID NO: 34037 - DNA, 40 bp, Artificial Sequence
  Description of Artificial Sequence: Synthetic primer
gcatcacaagatagaaggagctttaatctctaagccaaac

SEQ ID NO: 34038 - DNA, 40 bp, Artificial Sequence
  Description of Artificial Sequence: Synthetic primer
ccccagctccaaccccgtaagtaggaatgcctccaactcc

SEQ ID NO: 34039 - DNA, 40 bp, Artificial Sequence
  Description of Artificial Sequence: Synthetic primer
ggcggctgctgcagctcctactgcatcttccttctcttcc

SEQ ID NO: 34040 - DNA, 40 bp, Artificial Sequence
  Description of Artificial Sequence: Synthetic primer
ggccgcacccacgtggctggttcacctgcagcaggtggag

SEQ ID NO: 34041 - DNA, 40 bp, Artificial Sequence
  Description of Artificial Sequence: Synthetic primer
ggacaccctgaaggtctacctgaacaagttcagacagtcc

SEQ ID NO: 34042 - DNA, 40 bp, Artificial Sequence
  Description of Artificial Sequence: Synthetic primer
ccacgggtccccgccagcccttcagcagggcccgctcagg

SEQ ID NO: 34043 - DNA, 40 bp, Artificial Sequence
  Description of Artificial Sequence: Synthetic primer
ccttcttttccttctccatttcctgtcgtatcctgacttg

SEQ ID NO: 34044 - DNA, 40 bp, Artificial Sequence
  Description of Artificial Sequence: Synthetic primer
aagttattctgacattagacttaattttcacatagtaggc

SEQ ID NO: 34045 - DNA, 40 bp, Artificial Sequence
  Description of Artificial Sequence: Synthetic primer
tcaatgtccttacaatccgatcgattcctgattagtttgc

SEQ ID NO: 34046 - DNA, 40 bp, Artificial Sequence
  Description of Artificial Sequence: Synthetic primer
gtgagttccctgggcagcccccaggaaggccttccagatc

SEQ ID NO: 34047 - DNA, 40 bp, Artificial Sequence
  Description of Artificial Sequence: Synthetic primer
gtgacgacacaccactggaaatgatgacatcgcctcgagc

SEQ ID NO: 34048 - DNA, 40 bp, Artificial Sequence
  Description of Artificial Sequence: Synthetic primer
acaccaattcctgtgcctgcactcagaccaactcgagcac

SEQ ID NO: 34049 - DNA, 40 bp, Artificial Sequence
  Description of Artificial Sequence: Synthetic primer
ccgggggctctggtgcctggtggagtggctgacgctgctg

SEQ ID NO: 34050 - DNA, 40 bp, Artificial Sequence
  Description of Artificial Sequence: Synthetic primer
cgcagcagtattgggggtggttcgggggaggggtgtttcg

SEQ ID NO: 34051 - DNA, 40 bp, Artificial Sequence
  Description of Artificial Sequence: Synthetic primer
taatgtatttagatgctgttcaagcgtctccataagactg

SEQ ID NO: 34052 - DNA, 40 bp, Artificial Sequence
  Description of Artificial Sequence: Synthetic primer
ctttcaaaatggcgccggctggcctggccagtgacgtcac

SEQ ID NO: 34053 - DNA, 40 bp, Artificial Sequence
  Description of Artificial Sequence: Synthetic primer
aaggccggcctgaggacggacagctgggttctcacttcag

SEQ ID NO: 34054 - DNA, 40 bp, Artificial Sequence
  Description of Artificial Sequence: Synthetic primer
caaccaggtgcaccgcaagtcggtgaagaaaggctttgac

SEQ ID NO: 34055 - DNA, 40 bp, Artificial Sequence
  Description of Artificial Sequence: Synthetic primer
catagtggtgagaggtttatctcatgtacattttagttac

SEQ ID NO: 34056 - DNA, 40 bp, Artificial Sequence
  Description of Artificial Sequence: Synthetic primer
agcaaggtctttcagaccagcgtacagtttatccactttg

SEQ ID NO: 34057 - DNA, 40 bp, Artificial Sequence
  Description of Artificial Sequence: Synthetic primer
gaccagcaaatccattggggccagcaggaccgacctcacc

SEQ ID NO: 34058 - DNA, 40 bp, Artificial Sequence
  Description of Artificial Sequence: Synthetic primer
ttcagggaagttcttcccagcagggttgcattcacagtcg

SEQ ID NO: 34059 - DNA, 40 bp, Artificial Sequence
  Description of Artificial Sequence: Synthetic primer
acagggtcagctgcagcggtggccgctcgcccaccgtgcg

SEQ ID NO: 34060 - DNA, 40 bp, Artificial Sequence
  Description of Artificial Sequence: Synthetic primer
tctgtcttgcaggtggcaatcttctaatttgctgaatgtg

SEQ ID NO: 34061 - DNA, 40 bp, Artificial Sequence
  Description of Artificial Sequence: Synthetic primer
atggccgtggccccgctgttcgacaccaagatcttcagga

SEQ ID NO: 34062 - DNA, 40 bp, Artificial Sequence
  Description of Artificial Sequence: Synthetic primer
tgctgtggtcacaagagagcctgagggggacgtgattacc

SEQ ID NO: 34063 - DNA, 40 bp, Artificial Sequence
  Description of Artificial Sequence: Synthetic primer
caaacatctgatggtccaaccactctaggtgaattcagag

SEQ ID NO: 34064 - DNA, 40 bp, Artificial Sequence
  Description of Artificial Sequence: Synthetic primer
tggagggccgtctcccggctcagacgctcctgggggctca

SEQ ID NO: 34065 - DNA, 40 bp, Artificial Sequence
  Description of Artificial Sequence: Synthetic primer
gatgtggacaacagctgtgtctagtatttatcatcagtac

SEQ ID NO: 34066 - DNA, 40 bp, Artificial Sequence
  Description of Artificial Sequence: Synthetic primer
attcaaatggtgcatgtgtttggtatcttcaacagtagac

SEQ ID NO: 34067 - DNA, 40 bp, Artificial Sequence
  Description of Artificial Sequence: Synthetic primer
tctcccacaagcctgctccaaagaaactctgtgttatgtg

SEQ ID NO: 34068 - DNA, 40 bp, Artificial Sequence
  Description of Artificial Sequence: Synthetic primer
aggaacataacatgtatcccacaccttctggatttacctc

SEQ ID NO: 34069 - DNA, 40 bp, Artificial Sequence
  Description of Artificial Sequence: Synthetic primer
tgtatacgatgtacgtgttgtccagctcgcccgtctcaac

SEQ ID NO: 34070 - DNA, 40 bp, Artificial Sequence
  Description of Artificial Sequence: Synthetic primer
caacctgggatgagaggttctctgccctggaaaggctgac

SEQ ID NO: 34071 - DNA, 40 bp, Artificial Sequence
  Description of Artificial Sequence: Synthetic primer
ctgttttagccatttgctccatctctaagttgtacagcag

SEQ ID NO: 34072 - DNA, 40 bp, Artificial Sequence
  Description of Artificial Sequence: Synthetic primer
agcgaagaatgtgtggacacattgtctgaattgcattaag

SEQ ID NO: 34073 - DNA, 40 bp, Artificial Sequence
  Description of Artificial Sequence: Synthetic primer
catctcggagctcacggagagccgcctgaggagcggcaca

SEQ ID NO: 34074 - DNA, 40 bp, Artificial Sequence
  Description of Artificial Sequence: Synthetic primer
aaagccagcctttggtaatctctgttaggttgttatggtc

SEQ ID NO: 34075 - DNA, 40 bp, Artificial Sequence
  Description of Artificial Sequence: Synthetic primer
gctgctgaggccgcccctgtggtcaagcgggagcccttgg

SEQ ID NO: 34076 - DNA, 40 bp, Artificial Sequence
  Description of Artificial Sequence: Synthetic primer
cccagctccccctgcccaccaggacccaccgttggctgcc

SEQ ID NO: 34077 - DNA, 40 bp, Artificial Sequence
  Description of Artificial Sequence: Synthetic primer
tccattaaagtttctgcaagactgacaaaggtacattcta

SEQ ID NO: 34078 - DNA, 40 bp, Artificial Sequence
  Description of Artificial Sequence: Synthetic primer
aattacttggcaccagatgctacagctgcagataaacgac

SEQ ID NO: 34079 - DNA, 40 bp, Artificial Sequence
  Description of Artificial Sequence: Synthetic primer
cagtgagttggcgtttatagcgtccgtgggaaagaatgtc

SEQ ID NO: 34080 - DNA, 40 bp, Artificial Sequence
  Description of Artificial Sequence: Synthetic primer
ttgcaacacagagaggagcagctgcagggaaaccaccttg

SEQ ID NO: 34081 - DNA, 40 bp, Artificial Sequence
  Description of Artificial Sequence: Synthetic primer
aaaagaatggttaacaaattttatggaagaccggagacag

SEQ ID NO: 34082 - DNA, 40 bp, Artificial Sequence
  Description of Artificial Sequence: Synthetic primer
tttgctaccctcaaagtccagacatgcaacctttcatcat

SEQ ID NO: 34083 - DNA, 40 bp, Artificial Sequence
  Description of Artificial Sequence: Synthetic primer
gctaaaaattctgtgggctcatcaccaccttccaaaatag

SEQ ID NO: 34084 - DNA, 40 bp, Artificial Sequence
  Description of Artificial Sequence: Synthetic primer
caaactgttttccatctcatccaagaatgatcctgccaga

SEQ ID NO: 34085 - DNA, 40 bp, Artificial Sequence
  Description of Artificial Sequence: Synthetic primer
ttttcttcattctgatcatggtccccactgtcatcatctt

SEQ ID NO: 34086 - DNA, 40 bp, Artificial Sequence
  Description of Artificial Sequence: Synthetic primer
tagatggtctcatcggagtcgcatttgtagacatgcttag

SEQ ID NO: 34087 - DNA, 40 bp, Artificial Sequence
  Description of Artificial Sequence: Synthetic primer
tggccgatttttttggcaattatttcttaagaccatattg

SEQ ID NO: 34088 - DNA, 40 bp, Artificial Sequence
  Description of Artificial Sequence: Synthetic primer
ctgttgaaaccacttggctgctggatttaaatgggtaatc

SEQ ID NO: 34089 - DNA, 40 bp, Artificial Sequence
  Description of Artificial Sequence: Synthetic primer
aagaggttctgacaggtaggtgaccacgaagccgaagtgg

SEQ ID NO: 34090 - DNA, 40 bp, Artificial Sequence
  Description of Artificial Sequence: Synthetic primer
tgtaaatgtctttgaataattttctgttccattggatgac

SEQ ID NO: 34091 - DNA, 40 bp, Artificial Sequence
  Description of Artificial Sequence: Synthetic primer
cgaaacccacactgcagcagatcagccacatcgcccagca

SEQ ID NO: 34092 - DNA, 40 bp, Artificial Sequence
  Description of Artificial Sequence: Synthetic primer
ggagccaggctgtgcaaatctgggtggctgctctcgttcc

SEQ ID NO: 34093 - DNA, 40 bp, Artificial Sequence
  Description of Artificial Sequence: Synthetic primer
gtaaatagcaaatgctagacttgaatattatattaaaatc

SEQ ID NO: 34094 - DNA, 40 bp, Artificial Sequence
  Description of Artificial Sequence: Synthetic primer
gcgtctccgcactcgcagtatcacacccctcccgttcctc

SEQ ID NO: 34095 - DNA, 40 bp, Artificial Sequence
  Description of Artificial Sequence: Synthetic primer
gaaaaaacaaaatacataaaattcacaggaaatcagatcc

SEQ ID NO: 34096 - DNA, 40 bp, Artificial Sequence
  Description of Artificial Sequence: Synthetic primer
ttgctgcttgcagtaaccttatgcctagcaacatgccaat

SEQ ID NO: 34097 - DNA, 40 bp, Artificial Sequence
  Description of Artificial Sequence: Synthetic primer
ggtacccccgaggacgcctcaggaatacctgaggcgggtc

SEQ ID NO: 34098 - DNA, 40 bp, Artificial Sequence
  Description of Artificial Sequence: Synthetic primer
gacctggtactcgtggtcactgcccaccacagcaaatggg

SEQ ID NO: 34099 - DNA, 40 bp, Artificial Sequence
  Description of Artificial Sequence: Synthetic primer
ctccctgtggcatattgtattgctgagaaggaggctgctg

SEQ ID NO: 34100 - DNA, 40 bp, Artificial Sequence
  Description of Artificial Sequence: Synthetic primer
ttttattacaagagtgtagagaagggagaccaatagaagg

SEQ ID NO: 34101 - DNA, 40 bp, Artificial Sequence
  Description of Artificial Sequence: Synthetic primer
gacaagaaacacgtctggctaggagaaactatcaatgctg

SEQ ID NO: 34102 - DNA, 40 bp, Artificial Sequence
  Description of Artificial Sequence: Synthetic primer
aaaaaaagaaaagaaaactgtattcattccctttaaaatg

SEQ ID NO: 34103 - DNA, 40 bp, Artificial Sequence
  Description of Artificial Sequence: Synthetic primer
ctcagtactctttgccgtacccaccggagcctggcgcagc

SEQ ID NO: 34104 - DNA, 40 bp, Artificial Sequence
  Description of Artificial Sequence: Synthetic primer
ggctcttcagtcaaccagtgcctgctgttcccgtctccag

SEQ ID NO: 34105 - DNA, 40 bp, Artificial Sequence
  Description of Artificial Sequence: Synthetic primer
acatgatagtaagtgtaagccatgtaaaaagtaaataatg

SEQ ID NO: 34106 - DNA, 40 bp, Artificial Sequence
  Description of Artificial Sequence: Synthetic primer
cacttcccaaggcgacttcctgtctctccactttctttcc

SEQ ID NO: 34107 - DNA, 40 bp, Artificial Sequence
  Description of Artificial Sequence: Synthetic primer
aacaccatttcatagagaccagactgtgaaaactcaaaag

SEQ ID NO: 34108 - DNA, 40 bp, Artificial Sequence
  Description of Artificial Sequence: Synthetic primer
gcagccctggactccacaccagaaagcacaggtcagtagg

SEQ ID NO: 34109 - DNA, 40 bp, Artificial Sequence
  Description of Artificial Sequence: Synthetic primer
gattttgtacctcggggacctgctggagacctgccatttc

SEQ ID NO: 34110 - DNA, 40 bp, Artificial Sequence
  Description of Artificial Sequence: Synthetic primer
tttgtcatattgagttgattgggtccaggtccctgcatag

SEQ ID NO: 34111 - DNA, 40 bp, Artificial Sequence
  Description of Artificial Sequence: Synthetic primer
ttcaaagcatggcaccgtactaggttgatatcaaccaatc

SEQ ID NO: 34112 - DNA, 40 bp, Artificial Sequence
  Description of Artificial Sequence: Synthetic primer
tgctctttcacatgatgaagctcctgctctaaccgtttgc

SEQ ID NO: 34113 - DNA, 40 bp, Artificial Sequence
  Description of Artificial Sequence: Synthetic primer
ccactatttattgtgagccctggaggctcccatgtgcttg

SEQ ID NO: 34114 - DNA, 40 bp, Artificial Sequence
  Description of Artificial Sequence: Synthetic primer
ccaccatattggaattattttctttgttgccaggaagatg

SEQ ID NO: 34115 - DNA, 40 bp, Artificial Sequence
  Description of Artificial Sequence: Synthetic primer
tgttggagaacgtccccggggcacagggcttgcacaccac

SEQ ID NO: 34116 - DNA, 40 bp, Artificial Sequence
  Description of Artificial Sequence: Synthetic primer
ttctctcggaagtaccaaggaatacaactttagttctcag

SEQ ID NO: 34117 - DNA, 40 bp, Artificial Sequence
  Description of Artificial Sequence: Synthetic primer
tagccgctcgaattgggccatgtcgaacagagaagagctc

SEQ ID NO: 34118 - DNA, 40 bp, Artificial Sequence
  Description of Artificial Sequence: Synthetic primer
tgcatcactcatcattttattatttgtcaggggcaaattc

SEQ ID NO: 34119 - DNA, 40 bp, Artificial Sequence
  Description of Artificial Sequence: Synthetic primer
tgcgctgggtccccgcccggggtgacggctccggccgccg

SEQ ID NO: 34120 - DNA, 40 bp, Artificial Sequence
  Description of Artificial Sequence: Synthetic primer
gatggagtctcatggcacaagaagattaaaacagtgtctc

SEQ ID NO: 34121 - DNA, 40 bp, Artificial Sequence
  Description of Artificial Sequence: Synthetic primer
cttggggaccttttgggggagggctgcgacgcttgctctg

SEQ ID NO: 34122 - DNA, 40 bp, Artificial Sequence
  Description of Artificial Sequence: Synthetic primer
gtgtgggttctcaagtgccgtgttaggtttgcagaccttg

SEQ ID NO: 34123 - DNA, 40 bp, Artificial Sequence
  Description of Artificial Sequence: Synthetic primer
cagggccatgccttcaggacgccccacaccccacgctgag

SEQ ID NO: 34124 - DNA, 40 bp, Artificial Sequence
  Description of Artificial Sequence: Synthetic primer
agtcctgatggcaggtatctggcaagtggttcttttgaca

SEQ ID NO: 34125 - DNA, 40 bp, Artificial Sequence
  Description of Artificial Sequence: Synthetic primer
agaagtggaggcaggtgttggaacattcacagtttaatgc

SEQ ID NO: 34126 - DNA, 40 bp, Artificial Sequence
  Description of Artificial Sequence: Synthetic primer
gcgacagtctttttgtgcttcatgtacagcgtgcggacaa

SEQ ID NO: 34127 - DNA, 40 bp, Artificial Sequence
  Description of Artificial Sequence: Synthetic primer
ttcactaaattacaaataattacccaaatataaaaaggac

SEQ ID NO: 34128 - DNA, 40 bp, Artificial Sequence
  Description of Artificial Sequence: Synthetic primer
ggagacgccgggctagagcctttgggatcgtcctggattc

SEQ ID NO: 34129 - DNA, 40 bp, Artificial Sequence
  Description of Artificial Sequence: Synthetic primer
acaaagaaactttttaataaagtatattgaaagtttcctg

SEQ ID NO: 34130 - DNA, 40 bp, Artificial Sequence
  Description of Artificial Sequence: Synthetic primer
tcttgtctgtttaatccagagaacagactgagaaactctg

SEQ ID NO: 34131 - DNA, 40 bp, Artificial Sequence
  Description of Artificial Sequence: Synthetic primer
atttgtatttctgttcttgtttgctctggcaatgtctctg

SEQ ID NO: 34132 - DNA, 40 bp, Artificial Sequence
  Description of Artificial Sequence: Synthetic primer
cagccaaaccatacttcaccagatccgcattagccattct

SEQ ID NO: 34133 - DNA, 40 bp, Artificial Sequence
  Description of Artificial Sequence: Synthetic primer
atgccatcaacaggatcagccctgatgcctgggagttctg

SEQ ID NO: 34134 - DNA, 40 bp, Artificial Sequence
  Description of Artificial Sequence: Synthetic primer
atttgaattactgtcctgtgacatagcacggacttccttc

SEQ ID NO: 34135 - DNA, 40 bp, Artificial Sequence
  Description of Artificial Sequence: Synthetic primer
tggtggagcctgagctgttactcagagtctcgatgcttcc

SEQ ID NO: 34136 - DNA, 40 bp, Artificial Sequence
  Description of Artificial Sequence: Synthetic primer
gctctgccgaagacggtcatgcagctttttccgctgtttc

SEQ ID NO: 34137 - DNA, 40 bp, Artificial Sequence
  Description of Artificial Sequence: Synthetic primer
acctattggctcttctgaaagatatcagaggtggcttcag

SEQ ID NO: 34138 - DNA, 40 bp, Artificial Sequence
  Description of Artificial Sequence: Synthetic primer
cagtcactatacttccacagcccatcactccactactgtc

SEQ ID NO: 34139 - DNA, 40 bp, Artificial Sequence
  Description of Artificial Sequence: Synthetic primer
atgctctatctccttcacactcttggtgacaaaggaagac

SEQ ID NO: 34140 - DNA, 40 bp, Artificial Sequence
  Description of Artificial Sequence: Synthetic primer
aagcatgctccttgctcatccagtataggaatcagatgaa

SEQ ID NO: 34141 - DNA, 40 bp, Artificial Sequence
  Description of Artificial Sequence: Synthetic primer
tcagttccagtctggcttttgaagcgtcaccatcatttac

SEQ ID NO: 34142 - DNA, 40 bp, Artificial Sequence
  Description of Artificial Sequence: Synthetic primer
tttaaaataatcacacctgataagtgttttatgcatttcc

SEQ ID NO: 34143 - DNA, 40 bp, Artificial Sequence
  Description of Artificial Sequence: Synthetic primer
atcaaactcctctgaaggcgaagcccagagtgaacatgag

SEQ ID NO: 34144 - DNA, 40 bp, Artificial Sequence
  Description of Artificial Sequence: Synthetic primer
gccttctagtgacgagattcgctacggggtggtagcactg

SEQ ID NO: 34145 - DNA, 40 bp, Artificial Sequence
  Description of Artificial Sequence: Synthetic primer
tgctagattcaactatctcaactaagcaggaagtgggttc

SEQ ID NO: 34146 - DNA, 40 bp, Artificial Sequence
  Description of Artificial Sequence: Synthetic primer
atgaggttgtcctgcaatgtccctaggaatggctgcttgc

SEQ ID NO: 34147 - DNA, 40 bp, Artificial Sequence
  Description of Artificial Sequence: Synthetic primer
attaggattgcaactggacagatagctggcgtggataaag

SEQ ID NO: 34148 - DNA, 40 bp, Artificial Sequence
  Description of Artificial Sequence: Synthetic primer
gtgtgattgaaggaagggaatccaggtgtgtaagggtcac

SEQ ID NO: 34149 - DNA, 40 bp, Artificial Sequence
  Description of Artificial Sequence: Synthetic primer
gaatcagatctgaaagaggtccagaataaaatatattttg

SEQ ID NO: 34150 - DNA, 40 bp, Artificial Sequence
  Description of Artificial Sequence: Synthetic primer
taaaaactatggaatttctcttattaaagtccaaaccatc

SEQ ID NO: 34151 - DNA, 40 bp, Artificial Sequence
  Description of Artificial Sequence: Synthetic primer
aagacacccacatacggccaacgcccgctagcctttcttc

SEQ ID NO: 34152 - DNA, 40 bp, Artificial Sequence
  Description of Artificial Sequence: Synthetic primer
gcttcagtggttctataacggggcaatattgaatgagtcc

SEQ ID NO: 34153 - DNA, 40 bp, Artificial Sequence
  Description of Artificial Sequence: Synthetic primer
ttcataaataaccccagaagcatttcattcaggaaacaag

SEQ ID NO: 34154 - DNA, 40 bp, Artificial Sequence
  Description of Artificial Sequence: Synthetic primer
ggaagagtgtccttcctcccctcctccacccccaccacct

SEQ ID NO: 34155 - DNA, 40 bp, Artificial Sequence
  Description of Artificial Sequence: Synthetic primer
gagcgagcgctagctaatgtcgccggccatactgtgtaag

SEQ ID NO: 34156 - DNA, 40 bp, Artificial Sequence
  Description of Artificial Sequence: Synthetic primer
gttacatgttagagtgtgtgtgtcttggtaatggaaaagg

SEQ ID NO: 34157 - DNA, 40 bp, Artificial Sequence
  Description of Artificial Sequence: Synthetic primer
ggccggccacttcttcttccccctccttcagcgctttgac

SEQ ID NO: 34158 - DNA, 40 bp, Artificial Sequence
  Description of Artificial Sequence: Synthetic primer
cctgaactggggcaagagtctcagcttccatggggagctg

SEQ ID NO: 34159 - DNA, 40 bp, Artificial Sequence
  Description of Artificial Sequence: Synthetic primer
aagacaacaatgccaaagccactatcctgtgggacaatgc

SEQ ID NO: 34160 - DNA, 40 bp, Artificial Sequence
  Description of Artificial Sequence: Synthetic primer
ttcatggcgccggccggactgtgcagcggggtcgacccgc

SEQ ID NO: 34161 - DNA, 40 bp, Artificial Sequence
  Description of Artificial Sequence: Synthetic primer
gtacagttaaaggaatattaagtgggagaaagcctacaag

SEQ ID NO: 34162 - DNA, 40 bp, Artificial Sequence
  Description of Artificial Sequence: Synthetic primer
gcatcaacaatccattggcactgcgcatgctcatcagacg

SEQ ID NO: 34163 - DNA, 40 bp, Artificial Sequence
  Description of Artificial Sequence: Synthetic primer
agtgccttcagatactctttcttggcagcctcagttttcc

SEQ ID NO: 34164 - DNA, 40 bp, Artificial Sequence
  Description of Artificial Sequence: Synthetic primer
ttctgccatgtgttccacaaactcctccgagatggacacc

SEQ ID NO: 34165 - DNA, 40 bp, Artificial Sequence
  Description of Artificial Sequence: Synthetic primer
ccctcaggcaccgggaagacagtatccctgttggccctga

SEQ ID NO: 34166 - DNA, 40 bp, Artificial Sequence
  Description of Artificial Sequence: Synthetic primer
atggaaaaagtatcctctgggctttcagactttcagcaac

SEQ ID NO: 34167 - DNA, 40 bp, Artificial Sequence
  Description of Artificial Sequence: Synthetic primer
acttgtcagcttcaatgaagtttgcctttggtggtgcagc

SEQ ID NO: 34168 - DNA, 40 bp, Artificial Sequence
  Description of Artificial Sequence: Synthetic primer
gcagacacgtcataggagatgagggtgttgtcttccactc

SEQ ID NO: 34169 - DNA, 40 bp, Artificial Sequence
  Description of Artificial Sequence: Synthetic primer
cagcaaaagttcccttctctcaaatatttggcatcggcag

SEQ ID NO: 34170 - DNA, 40 bp, Artificial Sequence
  Description of Artificial Sequence: Synthetic primer
atactaagaatgccacccgagagaaaccgcatcatatacc

SEQ ID NO: 34171 - DNA, 40 bp, Artificial Sequence
  Description of Artificial Sequence: Synthetic primer
aggaaaattaggaacaggaatgctctttaaactcaggaag

SEQ ID NO: 34172 - DNA, 40 bp, Artificial Sequence
  Description of Artificial Sequence: Synthetic primer
ctcttcctcccgtgtcttcttgaggtgatcgtaggttctg

SEQ ID NO: 34173 - DNA, 40 bp, Artificial Sequence
  Description of Artificial Sequence: Synthetic primer
tgtttttaaatacaaagcaactataattggattccccaga

SEQ ID NO: 34174 - DNA, 40 bp, Artificial Sequence
  Description of Artificial Sequence: Synthetic primer
tgcataactattttttaaacggagtttagttttatattgc

SEQ ID NO: 34175 - DNA, 40 bp, Artificial Sequence
  Description of Artificial Sequence: Synthetic primer
tcttgatacacatctccgttccctggtaggtgtccatttg

SEQ ID NO: 34176 - DNA, 40 bp, Artificial Sequence
  Description of Artificial Sequence: Synthetic primer
gacgtgctgcagatccgaattggctccacacccgtggtgg

SEQ ID NO: 34177 - DNA, 40 bp, Artificial Sequence
  Description of Artificial Sequence: Synthetic primer
gtgtgctgcttcgcgagaaagtcacattcggaccctttgg

SEQ ID NO: 34178 - DNA, 40 bp, Artificial Sequence
  Description of Artificial Sequence: Synthetic primer
gcgcgggcccgaggccggaggaacccggactccggcgtag

SEQ ID NO: 34179 - DNA, 40 bp, Artificial Sequence
  Description of Artificial Sequence: Synthetic primer
gatgggcagctatatggcacgtggggatttttccatgcag

SEQ ID NO: 34180 - DNA, 40 bp, Artificial Sequence
  Description of Artificial Sequence: Synthetic primer
cgtttatcattcctcttgaaacaggtaaataaaactttcc

SEQ ID NO: 34181 - DNA, 40 bp, Artificial Sequence
  Description of Artificial Sequence: Synthetic primer
caaggactggaatattttcagcaagaactgcaacaacagc

SEQ ID NO: 34182 - DNA, 40 bp, Artificial Sequence
  Description of Artificial Sequence: Synthetic primer
tgaaaacctgtcttttgtagggttggctaccatgggtaat

SEQ ID NO: 34183 - DNA, 40 bp, Artificial Sequence
  Description of Artificial Sequence: Synthetic primer
taggagtttgcatgacttcacactttttttgcgtagtttc

SEQ ID NO: 34184 - DNA, 40 bp, Artificial Sequence
  Description of Artificial Sequence: Synthetic primer
acctgacaagagtcagagcctcatgaggttggcacgaacc

SEQ ID NO: 34185 - DNA, 40 bp, Artificial Sequence
  Description of Artificial Sequence: Synthetic primer
gtacataggactcagggcctgggggaggctgctggatttc

SEQ ID NO: 34186 - DNA, 40 bp, Artificial Sequence
  Description of Artificial Sequence: Synthetic primer
gccgttgctggcttcaccgccactgggggtctaacagtgg

SEQ ID NO: 34187 - DNA, 40 bp, Artificial Sequence
  Description of Artificial Sequence: Synthetic primer
atcttttcatcggatcattgagaagttcctgtcctttcag

SEQ ID NO: 34188 - DNA, 40 bp, Artificial Sequence
  Description of Artificial Sequence: Synthetic primer
aatctacaagagaccctggttggtttttcgttttgttttc

SEQ ID NO: 34189 - DNA, 40 bp, Artificial Sequence
  Description of Artificial Sequence: Synthetic primer
gctgctactgccgctagagccgctgccgccgcttttctag

SEQ ID NO: 34190 - DNA, 40 bp, Artificial Sequence
  Description of Artificial Sequence: Synthetic primer
atatgcagtactctcagtcatatgcagaaatacttttttt

SEQ ID NO: 34191 - DNA, 40 bp, Artificial Sequence
  Description of Artificial Sequence: Synthetic primer
actttgtactgaaaatattacaaagttttgcaccataacc

SEQ ID NO: 34192 - DNA, 40 bp, Artificial Sequence
  Description of Artificial Sequence: Synthetic primer
ccctgcagcagggccagccgggcagcccccttcacctggc

SEQ ID NO: 34193 - DNA, 40 bp, Artificial Sequence
  Description of Artificial Sequence: Synthetic primer
ttgtccttcaacctcatcaaaagttcactggctgtctcac

SEQ ID NO: 34194 - DNA, 40 bp, Artificial Sequence
  Description of Artificial Sequence: Synthetic primer
aacttgtccagagcaacaagataacttgaattttctactc

SEQ ID NO: 34195 - DNA, 40 bp, Artificial Sequence
  Description of Artificial Sequence: Synthetic primer
ccccagttgcacacccatcaaagaagaagaaattatgaac

SEQ ID NO: 34196 - DNA, 40 bp, Artificial Sequence
  Description of Artificial Sequence: Synthetic primer
tttctcaaacagttccaggaaccactttttggattttgac

SEQ ID NO: 34197 - DNA, 40 bp, Artificial Sequence
  Description of Artificial Sequence: Synthetic primer
agcctcatctctgcatttggcctcattctgctgctgcttc

SEQ ID NO: 34198 - DNA, 40 bp, Artificial Sequence
  Description of Artificial Sequence: Synthetic primer
gtcttgcagaagagccaggaggaactcccacagatagatg

SEQ ID NO: 34199 - DNA, 40 bp, Artificial Sequence
  Description of Artificial Sequence: Synthetic primer
gcttctcaccagtgtggataagcacatgggcacggaggtg

SEQ ID NO: 34200 - DNA, 40 bp, Artificial Sequence
  Description of Artificial Sequence: Synthetic primer
gggaaatctgaagaatggaataaatgacattaagaaacac

SEQ ID NO: 34201 - DNA, 40 bp, Artificial Sequence
  Description of Artificial Sequence: Synthetic primer
gagccgcaactacctgggtggcttcgccctgtccgtggcc

SEQ ID NO: 34202 - DNA, 40 bp, Artificial Sequence
  Description of Artificial Sequence: Synthetic primer
cgcggcggcggcaccagggttacgccagccccgcggggag

SEQ ID NO: 34203 - DNA, 40 bp, Artificial Sequence
  Description of Artificial Sequence: Synthetic primer
gacagagcacaatcagtatgagaccaccttgtaaatgcag

SEQ ID NO: 34204 - DNA, 40 bp, Artificial Sequence
  Description of Artificial Sequence: Synthetic primer
tatctgaagaatcatcatgcttggtccactgaagaacagc

SEQ ID NO: 34205 - DNA, 40 bp, Artificial Sequence
  Description of Artificial Sequence: Synthetic primer
tctcctgtgccttcttgcagctgaccacggtttcgtccag

SEQ ID NO: 34206 - DNA, 40 bp, Artificial Sequence
  Description of Artificial Sequence: Synthetic primer
tgctatcttcagtcgttcttcattcatttgaaatatcttg

SEQ ID NO: 34207 - DNA, 40 bp, Artificial Sequence
  Description of Artificial Sequence: Synthetic primer
gtagtttagatccaaagtaacttacaaatacaatcacaag

SEQ ID NO: 34208 - DNA, 40 bp, Artificial Sequence
  Description of Artificial Sequence: Synthetic primer
acacccaggaaaagactcaggacggacaagcacagtcttc

SEQ ID NO: 34209 - DNA, 40 bp, Artificial Sequence
  Description of Artificial Sequence: Synthetic primer
tataaacattcaacaaattctgtaattgggtctttatatg

SEQ ID NO: 34210 - DNA, 40 bp, Artificial Sequence
  Description of Artificial Sequence: Synthetic primer
tgctgcaggctctggggttttgcatgttcatgtgaccttc

SEQ ID NO: 34211 - DNA, 40 bp, Artificial Sequence
  Description of Artificial Sequence: Synthetic primer
caggacacttctgagtacatcatttcatgtcatcctgttg

SEQ ID NO: 34212 - DNA, 40 bp, Artificial Sequence
  Description of Artificial Sequence: Synthetic primer
tctctgactggtcactgattttctcaaagggcctctcttc

SEQ ID NO: 34213 - DNA, 40 bp, Artificial Sequence
  Description of Artificial Sequence: Synthetic primer
tatttgcaatctatgagttagtttcaaacttaaaaggcag

SEQ ID NO: 34214 - DNA, 40 bp, Artificial Sequence
  Description of Artificial Sequence: Synthetic primer
ctaaaatagcagcctaagtagtcatcatgtaaagaagttg

SEQ ID NO: 34215 - DNA, 40 bp, Artificial Sequence
  Description of Artificial Sequence: Synthetic primer
gtgtcacttgatgttagttttctgctattttatatgactg

SEQ ID NO: 34216 - DNA, 40 bp, Artificial Sequence
  Description of Artificial Sequence: Synthetic primer
gaaagaagtggaatccttattggcccaagtcctccttgtc

SEQ ID NO: 34217 - DNA, 40 bp, Artificial Sequence
  Description of Artificial Sequence: Synthetic primer
tctcttatatcccacggctgagactggccgcttcatcatc

SEQ ID NO: 34218 - DNA, 40 bp, Artificial Sequence
  Description of Artificial Sequence: Synthetic primer
tctcctgcgtccctctcgctggactcttcactgaccgtag

SEQ ID NO: 34219 - DNA, 40 bp, Artificial Sequence
  Description of Artificial Sequence: Synthetic primer
aaacccaaaacggaggacaagaattcagcaggccataagc

SEQ ID NO: 34220 - DNA, 40 bp, Artificial Sequence
  Description of Artificial Sequence: Synthetic primer
ccgctgaggttcaagctggccaggctccgcaggtccttcc

SEQ ID NO: 34221 - DNA, 40 bp, Artificial Sequence
  Description of Artificial Sequence: Synthetic primer
ttcatttttatttattcatatttatttggcgcccgctctc

SEQ ID NO: 34222 - DNA, 40 bp, Artificial Sequence
  Description of Artificial Sequence: Synthetic primer
ccgccggtccccgtggtgaagtgggtcttccaggcctctc

SEQ ID NO: 34223 - DNA, 40 bp, Artificial Sequence
  Description of Artificial Sequence: Synthetic primer
cagtccggactgtatcatcttcatcaaggcttatgggtag

SEQ ID NO: 34224 - DNA, 40 bp, Artificial Sequence
  Description of Artificial Sequence: Synthetic primer
caagtttgccctggtggcccctgtccaggctgaagaagac

SEQ ID NO: 34225 - DNA, 40 bp, Artificial Sequence
  Description of Artificial Sequence: Synthetic primer
ccctataaagttcctgttaatactgtttctccttctctcc

SEQ ID NO: 34226 - DNA, 40 bp, Artificial Sequence
  Description of Artificial Sequence: Synthetic primer
cagtacgaatgtgggaattactcaggagcagcagaatatc

SEQ ID NO: 34227 - DNA, 40 bp, Artificial Sequence
  Description of Artificial Sequence: Synthetic primer
aatgacctcagccaagggaagtcagaaatcatggaatatg

SEQ ID NO: 34228 - DNA, 40 bp, Artificial Sequence
  Description of Artificial Sequence: Synthetic primer
caaaagcatgatgcctagaccccaccccccagtgttagtc

SEQ ID NO: 34229 - DNA, 40 bp, Artificial Sequence
  Description of Artificial Sequence: Synthetic primer
ctctcttcctccccaacccagtgccaactgcaaagtgagc

SEQ ID NO: 34230 - DNA, 40 bp, Artificial Sequence
  Description of Artificial Sequence: Synthetic primer
acgtccttcgccagctcctgtgcagagaaaggccccattg

SEQ ID NO: 34231 - DNA, 40 bp, Artificial Sequence
  Description of Artificial Sequence: Synthetic primer
cattgtatttgcttaatagtggtccagacaagttcaaaac

SEQ ID NO: 34232 - DNA, 40 bp, Artificial Sequence
  Description of Artificial Sequence: Synthetic primer
aattagccacagaaaaagatatttccttgacttctcagac

SEQ ID NO: 34233 - DNA, 40 bp, Artificial Sequence
  Description of Artificial Sequence: Synthetic primer
taaacaagaggagcagcgataccaggccctgaaaatccac

SEQ ID NO: 34234 - DNA, 40 bp, Artificial Sequence
  Description of Artificial Sequence: Synthetic primer
tatcagtgaagtagtgattaacaatggggagtgtcaaaac

SEQ ID NO: 34235 - DNA, 40 bp, Artificial Sequence
  Description of Artificial Sequence: Synthetic primer
ctttccggctctgttggacagtgatgtgaagaggttcagc

SEQ ID NO: 34236 - DNA, 40 bp, Artificial Sequence
  Description of Artificial Sequence: Synthetic primer
agcgcgccgcctggcagaccgacggacaggcgcctggacc

SEQ ID NO: 34237 - DNA, 40 bp, Artificial Sequence
  Description of Artificial Sequence: Synthetic primer
gactgggacaatgagaacagctctgcgcggctttttgagc

SEQ ID NO: 34238 - DNA, 40 bp, Artificial Sequence
  Description of Artificial Sequence: Synthetic primer
gaggagagcgcgaactggtagagcaagaaggtgggtggag

SEQ ID NO: 34239 - DNA, 40 bp, Artificial Sequence
  Description of Artificial Sequence: Synthetic primer
gtatatattaatgaaccattagattcaaataagagaatag

SEQ ID NO: 34240 - DNA, 40 bp, Artificial Sequence
  Description of Artificial Sequence: Synthetic primer
cgttttaaagttttccagtcccaaaactcaggatcaaaag

SEQ ID NO: 34241 - DNA, 40 bp, Artificial Sequence
  Description of Artificial Sequence: Synthetic primer
tgcccctcttcaacacctggacaccttgttagatggaacc

SEQ ID NO: 34242 - DNA, 40 bp, Artificial Sequence
  Description of Artificial Sequence: Synthetic primer
tctgaaactaatgaaagcactcctccctgatgtacagttg

SEQ ID NO: 34243 - DNA, 40 bp, Artificial Sequence
  Description of Artificial Sequence: Synthetic primer
aacatgaaatgatagatttgacctcctccctgttattttc

SEQ ID NO: 34244 - DNA, 40 bp, Artificial Sequence
  Description of Artificial Sequence: Synthetic primer
aaaatgattttttaacaagtgcagaaacaaaaagatactg

SEQ ID NO: 34245 - DNA, 40 bp, Artificial Sequence
  Description of Artificial Sequence: Synthetic primer
tgggggtgagttcccagatagagcttccctcccagtggac

SEQ ID NO: 34246 - DNA, 40 bp, Artificial Sequence
  Description of Artificial Sequence: Synthetic primer
aactcgttacctggatctttttacttcatttatttcattg

SEQ ID NO: 34247 - DNA, 40 bp, Artificial Sequence
  Description of Artificial Sequence: Synthetic primer
cggggggaggggacgggggccggggggaaaaggaaggagg

SEQ ID NO: 34248 - DNA, 40 bp, Artificial Sequence
  Description of Artificial Sequence: Synthetic primer
tccttggagcagcctgggctgttgctgcaagagaaaaggc

SEQ ID NO: 34249 - DNA, 40 bp, Artificial Sequence
  Description of Artificial Sequence: Synthetic primer
ccccggtagccgcctcgatcatagcctcctctgccaccac

SEQ ID NO: 34250 - DNA, 40 bp, Artificial Sequence
  Description of Artificial Sequence: Synthetic primer
atcatttctttgctgcttggagttaatagtgggacatctg

SEQ ID NO: 34251 - DNA, 40 bp, Artificial Sequence
  Description of Artificial Sequence: Synthetic primer
atgctgagttccatcaagtgcgtgttggtgggcgactctg

SEQ ID NO: 34252 - DNA, 40 bp, Artificial Sequence
  Description of Artificial Sequence: Synthetic primer
agggtagtagataagaatgctggtgagaaatcagcagacc

SEQ ID NO: 34253 - DNA, 40 bp, Artificial Sequence
  Description of Artificial Sequence: Synthetic primer
gctatttggactgggagtcagagcctggtctggccagttg

SEQ ID NO: 34254 - DNA, 40 bp, Artificial Sequence
  Description of Artificial Sequence: Synthetic primer
cggggcagccgctaccagggggtcagagggatcggaagag

SEQ ID NO: 34255 - DNA, 40 bp, Artificial Sequence
  Description of Artificial Sequence: Synthetic primer
aatgttagaaattaccactaatttacctggcagtgatgtc

SEQ ID NO: 34256 - DNA, 40 bp, Artificial Sequence
  Description of Artificial Sequence: Synthetic primer
cccaccttcccaatgtccccagggaacgatgtcaccccac

SEQ ID NO: 34257 - DNA, 40 bp, Artificial Sequence
  Description of Artificial Sequence: Synthetic primer
cgtgctggacagactagcaagtaacgtcgccaaacgtaag

SEQ ID NO: 34258 - DNA, 40 bp, Artificial Sequence
  Description of Artificial Sequence: Synthetic primer
tagaacactagagattttttgctggaagtcagagagatcg

SEQ ID NO: 34259 - DNA, 40 bp, Artificial Sequence
  Description of Artificial Sequence: Synthetic primer
atcaggccatgtgcaaaccctcgagtcaccaccacagtgc

SEQ ID NO: 34260 - DNA, 40 bp, Artificial Sequence
  Description of Artificial Sequence: Synthetic primer
ccagttctagttttatactggagtttccttgtacctgtcc

SEQ ID NO: 34261 - DNA, 40 bp, Artificial Sequence
  Description of Artificial Sequence: Synthetic primer
ttgggcactatatgaggatgagggtgtcatccgctgctac

SEQ ID NO: 34262 - DNA, 40 bp, Artificial Sequence
  Description of Artificial Sequence: Synthetic primer
acatcggcactctggcaggactggccaatgggccgtcagg

SEQ ID NO: 34263 - DNA, 40 bp, Artificial Sequence
  Description of Artificial Sequence: Synthetic primer
aggtaaatgagaagagcattgtggacattattggctgtcc

SEQ ID NO: 34264 - DNA, 40 bp, Artificial Sequence
  Description of Artificial Sequence: Synthetic primer
gggctggaactggctgcggactgtcatctgagcaggatcg

SEQ ID NO: 34265 - DNA, 40 bp, Artificial Sequence
  Description of Artificial Sequence: Synthetic primer
gatctgccctatttatacggcaaaagtttccctggcccta

SEQ ID NO: 34266 - DNA, 40 bp, Artificial Sequence
  Description of Artificial Sequence: Synthetic primer
cttaaagcacatgtccattaaaattcattttgttcctttt

SEQ ID NO: 34267 - DNA, 40 bp, Artificial Sequence
  Description of Artificial Sequence: Synthetic primer
cttttatttctttactgccatgaaatgagcctggcttttc

SEQ ID NO: 34268 - DNA, 40 bp, Artificial Sequence
  Description of Artificial Sequence: Synthetic primer
gggacaccactgaatatcgaagcaccactgtgtgttggtg

SEQ ID NO: 34269 - DNA, 40 bp, Artificial Sequence
  Description of Artificial Sequence: Synthetic primer
tggttctcccggcagcagcccgacgcaaaccaaggatctg

SEQ ID NO: 34270 - DNA, 40 bp, Artificial Sequence
  Description of Artificial Sequence: Synthetic primer
aactatggtcccagaccaaatatgagtatgcagccaaacc

SEQ ID NO: 34271 - DNA, 40 bp, Artificial Sequence
  Description of Artificial Sequence: Synthetic primer
aatcctacaaagggtcaaagtgtgccgagggagggctgtg

SEQ ID NO: 34272 - DNA, 40 bp, Artificial Sequence
  Description of Artificial Sequence: Synthetic primer
tcctcctccgctggcgagggacagagaggttgagggcatc

SEQ ID NO: 34273 - DNA, 40 bp, Artificial Sequence
  Description of Artificial Sequence: Synthetic primer
ttcatttttgccttactaaatagtcaaagacttataaaac

SEQ ID NO: 34274 - DNA, 40 bp, Artificial Sequence
  Description of Artificial Sequence: Synthetic primer
caaagggcaggctcatctggcccaggctggggggcatctg

SEQ ID NO: 34275 - DNA, 40 bp, Artificial Sequence
  Description of Artificial Sequence: Synthetic primer
gaggagcagctggtgctgctgcaggcggcgcggccgcggc

SEQ ID NO: 34276 - DNA, 40 bp, Artificial Sequence
  Description of Artificial Sequence: Synthetic primer
gcagcggatgtagtggggtgtgcacctcatcagtgtggcc

SEQ ID NO: 34277 - DNA, 40 bp, Artificial Sequence
  Description of Artificial Sequence: Synthetic primer
tgggcaagagggagcgggtggacttcgccgattcggtcac

SEQ ID NO: 34278 - DNA, 40 bp, Artificial Sequence
  Description of Artificial Sequence: Synthetic primer
gaaagtgaaatttcaaccacagcagatgactgcagttcag

SEQ ID NO: 34279 - DNA, 40 bp, Artificial Sequence
  Description of Artificial Sequence: Synthetic primer
ataaatatcaaatagattttctgtattaaagttactgaac

SEQ ID NO: 34280 - DNA, 40 bp, Artificial Sequence
  Description of Artificial Sequence: Synthetic primer
gtaactagtgtcttggaatatctgagtaattggtttggag

SEQ ID NO: 34281 - DNA, 40 bp, Artificial Sequence
  Description of Artificial Sequence: Synthetic primer
ggaggctttcggcaacgccaaaacagtgaagaacgacaac

SEQ ID NO: 34282 - DNA, 40 bp, Artificial Sequence
  Description of Artificial Sequence: Synthetic primer
tgatcacaatggtggtctcagtcacctcggtgttgtaagg

SEQ ID NO: 34283 - DNA, 40 bp, Artificial Sequence
  Description of Artificial Sequence: Synthetic primer
acatccgccccaacatcatcctggtgctgacggacgacca

SEQ ID NO: 34284 - DNA, 40 bp, Artificial Sequence
  Description of Artificial Sequence: Synthetic primer
caggaatgggtaatagtggtatcaccacagaaccagactc

SEQ ID NO: 34285 - DNA, 40 bp, Artificial Sequence
  Description of Artificial Sequence: Synthetic primer
acattttaaagttgaaacacattggagggttgcctttctc

SEQ ID NO: 34286 - DNA, 40 bp, Artificial Sequence
  Description of Artificial Sequence: Synthetic primer
ccactccaccatgcacttgagaatggacacgaggcactcc

SEQ ID NO: 34287 - DNA, 40 bp, Artificial Sequence
  Description of Artificial Sequence: Synthetic primer
cggagtccagtggctgaccgccttgctggagcggagatgc

SEQ ID NO: 34288 - DNA, 40 bp, Artificial Sequence
  Description of Artificial Sequence: Synthetic primer
caatattgaaggtgccccaggggctcctattggaaatacc

SEQ ID NO: 34289 - DNA, 40 bp, Artificial Sequence
  Description of Artificial Sequence: Synthetic primer
gtcaccgactctgccccacgacggtctgacctcttaattc

SEQ ID NO: 34290 - DNA, 40 bp, Artificial Sequence
  Description of Artificial Sequence: Synthetic primer
gctttgaaggaagcaggagtgtttgtgccccggagctttg

SEQ ID NO: 34291 - DNA, 40 bp, Artificial Sequence
  Description of Artificial Sequence: Synthetic primer
tatttagaaactggttctgtgttgaaatatagttgaaagt

SEQ ID NO: 34292 - DNA, 40 bp, Artificial Sequence
  Description of Artificial Sequence: Synthetic primer
tgcccacctttggctgatacccagagaacctgggcacttg

SEQ ID NO: 34293 - DNA, 40 bp, Artificial Sequence
  Description of Artificial Sequence: Synthetic primer
gactactgggagatggccgacaacctggccaaggaaaacc

SEQ ID NO: 34294 - DNA, 40 bp, Artificial Sequence
  Description of Artificial Sequence: Synthetic primer
cttgatccacataatgtcacaggagcatgtaaatggattg

SEQ ID NO: 34295 - DNA, 40 bp, Artificial Sequence
  Description of Artificial Sequence: Synthetic primer
atgaaactcctgttgcttcagccttttgacaaagatctac

SEQ ID NO: 34296 - DNA, 40 bp, Artificial Sequence
  Description of Artificial Sequence: Synthetic primer
tcatttaaggaatctgcaaacttccgcttcgctgaagaca

SEQ ID NO: 34297 - DNA, 40 bp, Artificial Sequence
  Description of Artificial Sequence: Synthetic primer
cgagaaaagtcactattccaggcattctggttcctgatct

SEQ ID NO: 34298 - DNA, 40 bp, Artificial Sequence
  Description of Artificial Sequence: Synthetic primer
tgtggcagacgaccccagtgtctgtgatgacctcgctcag

SEQ ID NO: 34299 - DNA, 40 bp, Artificial Sequence
  Description of Artificial Sequence: Synthetic primer
ctacgccacccccgtggatctctggagtgttggctgcata

SEQ ID NO: 34300 - DNA, 40 bp, Artificial Sequence
  Description of Artificial Sequence: Synthetic primer
cttcatcaggacgcaggtcatggaagcgctccactggccg

SEQ ID NO: 34301 - DNA, 40 bp, Artificial Sequence
  Description of Artificial Sequence: Synthetic primer
taaggagcctgattcgggctcgcactcgcgccagtccagc

SEQ ID NO: 34302 - DNA, 40 bp, Artificial Sequence
  Description of Artificial Sequence: Synthetic primer
agaaggacaggtgacgaaagctccgaggaatttcacagta

SEQ ID NO: 34303 - DNA, 40 bp, Artificial Sequence
  Description of Artificial Sequence: Synthetic primer
atttatggctactagtaataagagttgattgaatgatttt

SEQ ID NO: 34304 - DNA, 40 bp, Artificial Sequence
  Description of Artificial Sequence: Synthetic primer
cggccgactctttgcagcgggtgcacacagcctgcgcatc

SEQ ID NO: 34305 - DNA, 40 bp, Artificial Sequence
  Description of Artificial Sequence: Synthetic primer
taaattcatctggataattttctacccagttccaaaatgc

SEQ ID NO: 34306 - DNA, 40 bp, Artificial Sequence
  Description of Artificial Sequence: Synthetic primer
ttctggccttttctcattatctcaggttagcgccgtttag

SEQ ID NO: 34307 - DNA, 40 bp, Artificial Sequence
  Description of Artificial Sequence: Synthetic primer
agatctatattggcgttgttgagaatgggcacataacttg

SEQ ID NO: 34308 - DNA, 40 bp, Artificial Sequence
  Description of Artificial Sequence: Synthetic primer
aacacagaggctgagagatcctgacataaatccttgtttg

SEQ ID NO: 34309 - DNA, 40 bp, Artificial Sequence
  Description of Artificial Sequence: Synthetic primer
ctgaaaagtttagaagaatggtatctttcttttgggcttc

SEQ ID NO: 34310 - DNA, 40 bp, Artificial Sequence
  Description of Artificial Sequence: Synthetic primer
aaataaaacagtccatgaaaacaatcacaaacagaaaacc

SEQ ID NO: 34311 - DNA, 40 bp, Artificial Sequence
  Description of Artificial Sequence: Synthetic primer
gcctggtcactctatcgaatgaacagatttggttggtgag

SEQ ID NO: 34312 - DNA, 40 bp, Artificial Sequence
  Description of Artificial Sequence: Synthetic primer
ttttaataaatgttataataccaacctactaactctggac

SEQ ID NO: 34313 - DNA, 40 bp, Artificial Sequence
  Description of Artificial Sequence: Synthetic primer
ccaggagtcctagaagctttgcaggcatgcccaaacttag

SEQ ID NO: 34314 - DNA, 40 bp, Artificial Sequence
  Description of Artificial Sequence: Synthetic primer
cttaacaactttacataattcacaatgagaatgtgacaac

SEQ ID NO: 34315 - DNA, 40 bp, Artificial Sequence
  Description of Artificial Sequence: Synthetic primer
ccgcacctgtattccccggtgttgatcagccagcttgtgc

SEQ ID NO: 34316 - DNA, 40 bp, Artificial Sequence
  Description of Artificial Sequence: Synthetic primer
ggagggaatggctgtgtcccacaggaataacagcgggatg

SEQ ID NO: 34317 - DNA, 40 bp, Artificial Sequence
  Description of Artificial Sequence: Synthetic primer
agggcactgcttattttaaaataatttaatgtgagatgtg

SEQ ID NO: 34318 - DNA, 40 bp, Artificial Sequence
  Description of Artificial Sequence: Synthetic primer
ctccagagtatgcagcagggaccggaggcgttcagcacag

SEQ ID NO: 34319 - DNA, 40 bp, Artificial Sequence
  Description of Artificial Sequence: Synthetic primer
cgcagaggatggcgcctgtgggcacagacaaggagctcag

SEQ ID NO: 34320 - DNA, 40 bp, Artificial Sequence
  Description of Artificial Sequence: Synthetic primer
ggacctaatggagatgctggtcgccctggggagcctggtc

SEQ ID NO: 34321 - DNA, 40 bp, Artificial Sequence
  Description of Artificial Sequence: Synthetic primer
gcgtccaccggggcaggcgcaaagtggacagagcatgcag

SEQ ID NO: 34322 - DNA, 40 bp, Artificial Sequence
  Description of Artificial Sequence: Synthetic primer
tagatttaagatagtaccatcttaaaagtatgttgaaagg

SEQ ID NO: 34323 - DNA, 40 bp, Artificial Sequence
  Description of Artificial Sequence: Synthetic primer
ggggcatctccgcggtccggcccggggccccgggatctcg

SEQ ID NO: 34324 - DNA, 40 bp, Artificial Sequence
  Description of Artificial Sequence: Synthetic primer
gctcctgaagaaacagcttcaggtcttgctcccagcttac

SEQ ID NO: 34325 - DNA, 40 bp, Artificial Sequence
  Description of Artificial Sequence: Synthetic primer
atacaacatttcttccttcttcaaagtctgatcagtatgc

SEQ ID NO: 34326 - DNA, 40 bp, Artificial Sequence
  Description of Artificial Sequence: Synthetic primer
aggaaaatgaggccttgctgctccgattcaagtattacag

SEQ ID NO: 34327 - DNA, 40 bp, Artificial Sequence
  Description of Artificial Sequence: Synthetic primer
agcaaaagcacacaccgaagctccagcctatttctgtatc

SEQ ID NO: 34328 - DNA, 40 bp, Artificial Sequence
  Description of Artificial Sequence: Synthetic primer
gattgactgtgagacccgctacattgtggaaaactgcaac

SEQ ID NO: 34329 - DNA, 40 bp, Artificial Sequence
  Description of Artificial Sequence: Synthetic primer
gagaaagaagatttattatgaaccgcaatatgggaggaac

SEQ ID NO: 34330 - DNA, 40 bp, Artificial Sequence
  Description of Artificial Sequence: Synthetic primer
ttcagatcagtttatgacagttactaagaaacagcccttg

SEQ ID NO: 34331 - DNA, 40 bp, Artificial Sequence
  Description of Artificial Sequence: Synthetic primer
aagtgctcctccgcgatcatgtcttcgccttccttgatgg

SEQ ID NO: 34332 - DNA, 40 bp, Artificial Sequence
  Description of Artificial Sequence: Synthetic primer
ataatatatacacagcaaagttttaataaatgttggttcc

SEQ ID NO: 34333 - DNA, 40 bp, Artificial Sequence
  Description of Artificial Sequence: Synthetic primer
ttccagctgtgcccagtgatccaatattggttgaaacccc

SEQ ID NO: 34334 - DNA, 40 bp, Artificial Sequence
  Description of Artificial Sequence: Synthetic primer
gaggtacgggggagccagaatccacttagtgaggacagtg

SEQ ID NO: 34335 - DNA, 40 bp, Artificial Sequence
  Description of Artificial Sequence: Synthetic primer
gcatagaaagatacaggtttctcaccaactaggaataaag

SEQ ID NO: 34336 - DNA, 40 bp, Artificial Sequence
  Description of Artificial Sequence: Synthetic primer
tggtaatcacgttaatgaaatcttagaatcacccaagaag

SEQ ID NO: 34337 - DNA, 40 bp, Artificial Sequence
  Description of Artificial Sequence: Synthetic primer
cacccagtgctcgtccctgtcctggtcgtagttgatgacg

SEQ ID NO: 34338 - DNA, 40 bp, Artificial Sequence
  Description of Artificial Sequence: Synthetic primer
cgctgctcccgcgcggctcccgctcggcgcccgctagcac

SEQ ID NO: 34339 - DNA, 40 bp, Artificial Sequence
  Description of Artificial Sequence: Synthetic primer
gccaacaccaggacaaccatttggcctcatgtgcccagtc

SEQ ID NO: 34340 - DNA, 40 bp, Artificial Sequence
  Description of Artificial Sequence: Synthetic primer
tagaaaagtatgtgaaggaaaggcagctgtaaacgtattg

SEQ ID NO: 34341 - DNA, 40 bp, Artificial Sequence
  Description of Artificial Sequence: Synthetic primer
ctagatgaccagtctgaagatgaggcacttgaattagagg

SEQ ID NO: 34342 - DNA, 40 bp, Artificial Sequence
  Description of Artificial Sequence: Synthetic primer
cgtatcagtgaaactccctcccactgtctcttgtattagc

SEQ ID NO: 34343 - DNA, 40 bp, Artificial Sequence
  Description of Artificial Sequence: Synthetic primer
aggttttggtaaagatgacttccctggtggggtagataac

SEQ ID NO: 34344 - DNA, 40 bp, Artificial Sequence
  Description of Artificial Sequence: Synthetic primer
gttggaaataacccgcctctagtgctgttggtatgcaagg

SEQ ID NO: 34345 - DNA, 40 bp, Artificial Sequence
  Description of Artificial Sequence: Synthetic primer
gattgaagcaaatgaatggaagaagaaatacgaagagacc

SEQ ID NO: 34346 - DNA, 40 bp, Artificial Sequence
  Description of Artificial Sequence: Synthetic primer
tcagtaaaatacagtaaaatcaaaggtattcccaaactgg

SEQ ID NO: 34347 - DNA, 40 bp, Artificial Sequence
  Description of Artificial Sequence: Synthetic primer
aagccaacgctcccccaaggcgtccctgcggagggtggag

SEQ ID NO: 34348 - DNA, 40 bp, Artificial Sequence
  Description of Artificial Sequence: Synthetic primer
acttcccccacccccctttttttaagtaaaatgtaaattc

SEQ ID NO: 34349 - DNA, 40 bp, Artificial Sequence
  Description of Artificial Sequence: Synthetic primer
gagaccttgcgagaatttcttaagtttttgccagagtcag

SEQ ID NO: 34350 - DNA, 40 bp, Artificial Sequence
  Description of Artificial Sequence: Synthetic primer
tgcaactatttccacattatttattaaattgatctaagac

SEQ ID NO: 34351 - DNA, 40 bp, Artificial Sequence
  Description of Artificial Sequence: Synthetic primer
cctgctcagcaagcaccgggcgttcgaggacgagatgagc

SEQ ID NO: 34352 - DNA, 40 bp, Artificial Sequence
  Description of Artificial Sequence: Synthetic primer
ggcgctccaaagtacaccactgggcagttcgtccaaaagc

SEQ ID NO: 34353 - DNA, 40 bp, Artificial Sequence
  Description of Artificial Sequence: Synthetic primer
tacaaaactgagtttttccacaacctggtggacctgtaat

SEQ ID NO: 34354 - DNA, 40 bp, Artificial Sequence
  Description of Artificial Sequence: Synthetic primer
gattgatgctgttgcgcctccgctccttcttgttcagcag

SEQ ID NO: 34355 - DNA, 40 bp, Artificial Sequence
  Description of Artificial Sequence: Synthetic primer
gaaatactgccggagtatcagccctgagtggaagcagcag

SEQ ID NO: 34356 - DNA, 40 bp, Artificial Sequence
  Description of Artificial Sequence: Synthetic primer
ctgatggcggctccctcgtgtggcggcgacagaaaagctc

SEQ ID NO: 34357 - DNA, 40 bp, Artificial Sequence
  Description of Artificial Sequence: Synthetic primer
agtcaggcctggagggggcacctgcaatggcaccaacaac

SEQ ID NO: 34358 - DNA, 40 bp, Artificial Sequence
  Description of Artificial Sequence: Synthetic primer
ggttaggaaagaagtgagggcccattttgtggttcaagtg

SEQ ID NO: 34359 - DNA, 40 bp, Artificial Sequence
  Description of Artificial Sequence: Synthetic primer
cctggtcactcagtaatcttttactccaggaaggcacagg

SEQ ID NO: 34360 - DNA, 40 bp, Artificial Sequence
  Description of Artificial Sequence: Synthetic primer
ggcagcttctcgccctcctgcttctcatagaagttgagca

SEQ ID NO: 34361 - DNA, 40 bp, Artificial Sequence
  Description of Artificial Sequence: Synthetic primer
aaaaggctacaagaaaaattggtttgcaagatgaaaggag

SEQ ID NO: 34362 - DNA, 40 bp, Artificial Sequence
  Description of Artificial Sequence: Synthetic primer
gggatcttttcccttctctcccccattcccagcccacgag

SEQ ID NO: 34363 - DNA, 40 bp, Artificial Sequence
  Description of Artificial Sequence: Synthetic primer
tttgccagttggagtgctggagactttggatcggttggtg

SEQ ID NO: 34364 - DNA, 40 bp, Artificial Sequence
  Description of Artificial Sequence: Synthetic primer
tcccctgttccacaggcaatgcaattacctcggccacttc

SEQ ID NO: 34365 - DNA, 40 bp, Artificial Sequence
  Description of Artificial Sequence: Synthetic primer
cagaggataaccataaaatgggtaattctctctgaagttg

SEQ ID NO: 34366 - DNA, 40 bp, Artificial Sequence
  Description of Artificial Sequence: Synthetic primer
tacgcaggagcctatcctgaattttgtaaaatatcccaac

SEQ ID NO: 34367 - DNA, 40 bp, Artificial Sequence
  Description of Artificial Sequence: Synthetic primer
ttctcctcaacctgcctgcccctcacccgccgtgggaatg

SEQ ID NO: 34368 - DNA, 40 bp, Artificial Sequence
  Description of Artificial Sequence: Synthetic primer
gtgaacaatgtcagacgaatgctagatggcctggatcctc

SEQ ID NO: 34369 - DNA, 40 bp, Artificial Sequence
  Description of Artificial Sequence: Synthetic primer
tccattctccatttttagcccttccaaggtaactctacac

SEQ ID NO: 34370 - DNA, 40 bp, Artificial Sequence
  Description of Artificial Sequence: Synthetic primer
cagaagtgatcccgtgtagccttcgttgacaaataaagac

SEQ ID NO: 34371 - DNA, 40 bp, Artificial Sequence
  Description of Artificial Sequence: Synthetic primer
tttttgaaggcagtaaatctaaaagtaaagttaatagagc

SEQ ID NO: 34372 - DNA, 40 bp, Artificial Sequence
  Description of Artificial Sequence: Synthetic primer
gagaaatatagaaaaagtatgaaaactgtctaacatggtg

SEQ ID NO: 34373 - DNA, 40 bp, Artificial Sequence
  Description of Artificial Sequence: Synthetic primer
cttctcggattccaacccctcagctagaccaatacgagac

SEQ ID NO: 34374 - DNA, 40 bp, Artificial Sequence
  Description of Artificial Sequence: Synthetic primer
taggtttttctttaaatttaaggcttgttactttttcttt

SEQ ID NO: 34375 - DNA, 40 bp, Artificial Sequence
  Description of Artificial Sequence: Synthetic primer
atatttcccctctgaaaatctgaattatgccctcattctt

SEQ ID NO: 34376 - DNA, 40 bp, Artificial Sequence
  Description of Artificial Sequence: Synthetic primer
aaaagggcatctgagaccgagaatacttagaaatgtgtgc

SEQ ID NO: 34377 - DNA, 40 bp, Artificial Sequence
  Description of Artificial Sequence: Synthetic primer
tactgcctttcattcatatgttcttctaaagatagtctac

SEQ ID NO: 34378 - DNA, 40 bp, Artificial Sequence
  Description of Artificial Sequence: Synthetic primer
tataagtcaaatgctttgttgcagtaccatataaaaattg

SEQ ID NO: 34379 - DNA, 40 bp, Artificial Sequence
  Description of Artificial Sequence: Synthetic primer
gaatttgagaagaaatactcctgtattgagttgtatcgtg

SEQ ID NO: 34380 - DNA, 40 bp, Artificial Sequence
  Description of Artificial Sequence: Synthetic primer
cacgttactttgaagtcaccataaacttcagtatcatcag

SEQ ID NO: 34381 - DNA, 40 bp, Artificial Sequence
  Description of Artificial Sequence: Synthetic primer
aatggtgtcaggatattggtacattttgcctctggtgagc

SEQ ID NO: 34382 - DNA, 40 bp, Artificial Sequence
  Description of Artificial Sequence: Synthetic primer
agttaggagaaaccacgacagaaacgttcaagtcatcttc

SEQ ID NO: 34383 - DNA, 40 bp, Artificial Sequence
  Description of Artificial Sequence: Synthetic primer
gagtgatttttcgtttcctaccccttccagggccagttcg

SEQ ID NO: 34384 - DNA, 40 bp, Artificial Sequence
  Description of Artificial Sequence: Synthetic primer
attttgagagaagaaaagcaccagagactgcttggaaagg

SEQ ID NO: 34385 - DNA, 40 bp, Artificial Sequence
  Description of Artificial Sequence: Synthetic primer
tgttagtcagtagagtaaaatgctgtgtccacggggtgtc

SEQ ID NO: 34386 - DNA, 40 bp, Artificial Sequence
  Description of Artificial Sequence: Synthetic primer
ttaaggctttagtgacaacacatcatctcatggtgcatgg

SEQ ID NO: 34387 - DNA, 40 bp, Artificial Sequence
  Description of Artificial Sequence: Synthetic primer
gcccaggcggcgggagcggagggggcgccgaggccggatt

SEQ ID NO: 34388 - DNA, 40 bp, Artificial Sequence
  Description of Artificial Sequence: Synthetic primer
aggtgcatcacatggtcctctgtcatgttgccatacttgg

SEQ ID NO: 34389 - DNA, 40 bp, Artificial Sequence
  Description of Artificial Sequence: Synthetic primer
cagggattttctcagtccttcactcaagaacaagtagctg

SEQ ID NO: 34390 - DNA, 40 bp, Artificial Sequence
  Description of Artificial Sequence: Synthetic primer
gatataagaacaggaggaaagagtccattgacgtgaaatc

SEQ ID NO: 34391 - DNA, 40 bp, Artificial Sequence
  Description of Artificial Sequence: Synthetic primer
ccgtgacctagcagggggtacagggcggagcgccaaggag

SEQ ID NO: 34392 - DNA, 40 bp, Artificial Sequence
  Description of Artificial Sequence: Synthetic primer
ctgtttcagttgtgcaaccactgtggttcttttctctctc

SEQ ID NO: 34393 - DNA, 40 bp, Artificial Sequence
  Description of Artificial Sequence: Synthetic primer
ccactgtcaaaggctttactgaacatcttggctgctgcat

SEQ ID NO: 34394 - DNA, 40 bp, Artificial Sequence
  Description of Artificial Sequence: Synthetic primer
ggaagagatgggcattggcggggtcctcggcctcctctgg

SEQ ID NO: 34395 - DNA, 40 bp, Artificial Sequence
  Description of Artificial Sequence: Synthetic primer
cagcagctcagacaggcggcggcggttagtggagtcttcg

SEQ ID NO: 34396 - DNA, 40 bp, Artificial Sequence
  Description of Artificial Sequence: Synthetic primer
accggcagagccaacacccacgtgctgagtgcagcgtcaa

SEQ ID NO: 34397 - DNA, 40 bp, Artificial Sequence
  Description of Artificial Sequence: Synthetic primer
gagcaacaactgtggcagcacgaggacgattcatcagtag

SEQ ID NO: 34398 - DNA, 40 bp, Artificial Sequence
  Description of Artificial Sequence: Synthetic primer
ttactcgctgctgtgaaggaagatgctgctgctacaaagg

SEQ ID NO: 34399 - DNA, 40 bp, Artificial Sequence
  Description of Artificial Sequence: Synthetic primer
gcgctccagccttatctaggaaaggaggagtgggtgtagc

SEQ ID NO: 34400 - DNA, 40 bp, Artificial Sequence
  Description of Artificial Sequence: Synthetic primer
acttctgtaaatgtgattggattgtttgaaagaagattta

SEQ ID NO: 34401 - DNA, 40 bp, Artificial Sequence
  Description of Artificial Sequence: Synthetic primer
ggatagatgggaatgggagggcaaactgcagcacttgtta

SEQ ID NO: 34402 - DNA, 40 bp, Artificial Sequence
  Description of Artificial Sequence: Synthetic primer
caggccagaccgtggaagaagcctgaaatgcaccatcagc

SEQ ID NO: 34403 - DNA, 40 bp, Artificial Sequence
  Description of Artificial Sequence: Synthetic primer
tcttctcaacaaagtaacagaagaatacaacaaactcttg

SEQ ID NO: 34404 - DNA, 40 bp, Artificial Sequence
  Description of Artificial Sequence: Synthetic primer
ggccttggcctccccccagcctgcgggtgacggcgcctcg

SEQ ID NO: 34405 - DNA, 40 bp, Artificial Sequence
  Description of Artificial Sequence: Synthetic primer
tctgggaatggaactgctgaatttgagctttcaaagcctc

SEQ ID NO: 34406 - DNA, 40 bp, Artificial Sequence
  Description of Artificial Sequence: Synthetic primer
gttcaaatggggaacccccgtcttcctcagggtgctccac

SEQ ID NO: 34407 - DNA, 40 bp, Artificial Sequence
  Description of Artificial Sequence: Synthetic primer
gacatctccagcaggaggttcccatagttccggatcacag

SEQ ID NO: 34408 - DNA, 40 bp, Artificial Sequence
  Description of Artificial Sequence: Synthetic primer
cttaccatcacacttccagcagcagctcctcttcctcctg

SEQ ID NO: 34409 - DNA, 40 bp, Artificial Sequence
  Description of Artificial Sequence: Synthetic primer
atatgtacagaaacatgatcattgacagagagaaccagtg

SEQ ID NO: 34410 - DNA, 40 bp, Artificial Sequence
  Description of Artificial Sequence: Synthetic primer
tctgtcaaacattctgaagaaattattgtaagatccagtc

SEQ ID NO: 34411 - DNA, 40 bp, Artificial Sequence
  Description of Artificial Sequence: Synthetic primer
acatatatcccgatgtgtctgtgtgaatctttgtcttttt

SEQ ID NO: 34412 - DNA, 40 bp, Artificial Sequence
  Description of Artificial Sequence: Synthetic primer
cgatgccacagtgtcctatgaagacccacccactgccaag

SEQ ID NO: 34413 - DNA, 40 bp, Artificial Sequence
  Description of Artificial Sequence: Synthetic primer
gccccataatgtctcctcccacggagagactgttctgtgc

SEQ ID NO: 34414 - DNA, 40 bp, Artificial Sequence
  Description of Artificial Sequence: Synthetic primer
gctgatttacacagagcatctgagaacctccgccaagaag

SEQ ID NO: 34415 - DNA, 40 bp, Artificial Sequence
  Description of Artificial Sequence: Synthetic primer
cattggggatttcatacattgatgattttgcaaaagaagg

SEQ ID NO: 34416 - DNA, 40 bp, Artificial Sequence
  Description of Artificial Sequence: Synthetic primer
tcttctctgtgcgtgttacgcgatcaaagtccagagatag

SEQ ID NO: 34417 - DNA, 40 bp, Artificial Sequence
  Description of Artificial Sequence: Synthetic primer
acaaggaggtgaagcggccccagcactcccagctgcgcag

SEQ ID NO: 34418 - DNA, 40 bp, Artificial Sequence
  Description of Artificial Sequence: Synthetic primer
gggaggcgggtctcggctggccgagtgcgggcgcggggcg

SEQ ID NO: 34419 - DNA, 40 bp, Artificial Sequence
  Description of Artificial Sequence: Synthetic primer
tgaagaagcagcacgaaagagagaggtccgtctaatgaag

SEQ ID NO: 34420 - DNA, 40 bp, Artificial Sequence
  Description of Artificial Sequence: Synthetic primer
tctttggttataagcggcctcactactattttaaagaatg

SEQ ID NO: 34421 - DNA, 40 bp, Artificial Sequence
  Description of Artificial Sequence: Synthetic primer
aaacaggaaataaaggctctaaaagaagaaataggaaatg

SEQ ID NO: 34422 - DNA, 40 bp, Artificial Sequence
  Description of Artificial Sequence: Synthetic primer
cccatcgtgaatgggcaatgtgacccctacgccaccgtga

SEQ ID NO: 34423 - DNA, 40 bp, Artificial Sequence
  Description of Artificial Sequence: Synthetic primer
agagcgccttcatgaggagtccagggccagagaacagcta

SEQ ID NO: 34424 - DNA, 40 bp, Artificial Sequence
  Description of Artificial Sequence: Synthetic primer
tgcttccaggaaggcgacgtggtgtccaaccatcttgacg

SEQ ID NO: 34425 - DNA, 40 bp, Artificial Sequence
  Description of Artificial Sequence: Synthetic primer
agggttgtcagagcacagaaagttcctgccgtcactcctc

SEQ ID NO: 34426 - DNA, 40 bp, Artificial Sequence
  Description of Artificial Sequence: Synthetic primer
tccttctgtgagcagtctgaaagttcctcccaccttttct

SEQ ID NO: 34427 - DNA, 40 bp, Artificial Sequence
  Description of Artificial Sequence: Synthetic primer
cagttaaaacatttgtagagcagagaaatcatgcagagag

SEQ ID NO: 34428 - DNA, 40 bp, Artificial Sequence
  Description of Artificial Sequence: Synthetic primer
atttgcttgactccatagggctgggacacagctgccacac

SEQ ID NO: 34429 - DNA, 40 bp, Artificial Sequence
  Description of Artificial Sequence: Synthetic primer
tgctctgaagtactcaaagacactgacagagcacctgaag

SEQ ID NO: 34430 - DNA, 40 bp, Artificial Sequence
  Description of Artificial Sequence: Synthetic primer
tatctctgtctcttactcttttctctttctctttttctct

SEQ ID NO: 34431 - DNA, 40 bp, Artificial Sequence
  Description of Artificial Sequence: Synthetic primer
gaccccaacgagaccaagttttccacgacgtttgatcagc

SEQ ID NO: 34432 - DNA, 40 bp, Artificial Sequence
  Description of Artificial Sequence: Synthetic primer
aaaacctttgtatctttgccttttatgttgggatcttaat

SEQ ID NO: 34433 - DNA, 40 bp, Artificial Sequence
  Description of Artificial Sequence: Synthetic primer
ccttctccagcaactggagaggtgtctcatagaaagttcg

SEQ ID NO: 34434 - DNA, 40 bp, Artificial Sequence
  Description of Artificial Sequence: Synthetic primer
cacatgtcttgggaacggaaaaggagaattcaagtgtgac

SEQ ID NO: 34435 - DNA, 40 bp, Artificial Sequence
  Description of Artificial Sequence: Synthetic primer
cgctgagttgcagaagcccacggagcggcgcccggcgcgc

SEQ ID NO: 34436 - DNA, 40 bp, Artificial Sequence
  Description of Artificial Sequence: Synthetic primer
ctggcctgtgttgcctatgagcgggggcagtgtgaccttg

SEQ ID NO: 34437 - DNA, 40 bp, Artificial Sequence
  Description of Artificial Sequence: Synthetic primer
ggactcggaactgccgtcacttccgcaaggacgtgtgttc

SEQ ID NO: 34438 - DNA, 40 bp, Artificial Sequence
  Description of Artificial Sequence: Synthetic primer
ccttcgatctcccttccaggacttcaacagtgctcctacg

SEQ ID NO: 34439 - DNA, 40 bp, Artificial Sequence
  Description of Artificial Sequence: Synthetic primer
acctgcattgaacttgggaaatccctgttggcgagaaaac

SEQ ID NO: 34440 - DNA, 40 bp, Artificial Sequence
  Description of Artificial Sequence: Synthetic primer
ctcgtccttctcgaggaacacgcagatgatcagccggtcc

SEQ ID NO: 34441 - DNA, 40 bp, Artificial Sequence
  Description of Artificial Sequence: Synthetic primer
aggacttttgtttgctctggattataccttgtaccttctg

SEQ ID NO: 34442 - DNA, 40 bp, Artificial Sequence
  Description of Artificial Sequence: Synthetic primer
tgctgcacagtgtgtaggaagcacattgggtgtattattc

SEQ ID NO: 34443 - DNA, 40 bp, Artificial Sequence
  Description of Artificial Sequence: Synthetic primer
gctctgggagccataaaatgtaccaaacatctacctcttc

SEQ ID NO: 34444 - DNA, 40 bp, Artificial Sequence
  Description of Artificial Sequence: Synthetic primer
gttgacctcctcctgcaggtatttctcgtactggtcattg

SEQ ID NO: 34445 - DNA, 40 bp, Artificial Sequence
  Description of Artificial Sequence: Synthetic primer
cacctgtgtgcatggctcagctctcaacaagcccctggtc

SEQ ID NO: 34446 - DNA, 40 bp, Artificial Sequence
  Description of Artificial Sequence: Synthetic primer
gcattaaagtggtgtaatctccttctctacatctgttgtc

SEQ ID NO: 34447 - DNA, 40 bp, Artificial Sequence
  Description of Artificial Sequence: Synthetic primer
tccattgatgtatacaagtacctttatagttatcgatcac

SEQ ID NO: 34448 - DNA, 40 bp, Artificial Sequence
  Description of Artificial Sequence: Synthetic primer
gccccccactgaggcccaggatggccaggtcaccttctga

SEQ ID NO: 34449 - DNA, 40 bp, Artificial Sequence
  Description of Artificial Sequence: Synthetic primer
acggtgaccagcccggccgactggacttcagggggacagc

SEQ ID NO: 34450 - DNA, 40 bp, Artificial Sequence
  Description of Artificial Sequence: Synthetic primer
tatccagcaaacatggccgggtttgctaagagtcctcttg

SEQ ID NO: 34451 - DNA, 40 bp, Artificial Sequence
  Description of Artificial Sequence: Synthetic primer
atgttgagcccgtaattcattatcccttatcctctcatgc

SEQ ID NO: 34452 - DNA, 40 bp, Artificial Sequence
  Description of Artificial Sequence: Synthetic primer
ctgcagccctaaagcaatgcaacagggaaaagaatcgaac

SEQ ID NO: 34453 - DNA, 40 bp, Artificial Sequence
  Description of Artificial Sequence: Synthetic primer
gagtccacccctggttgtttctgattacggggaaatgaag

SEQ ID NO: 34454 - DNA, 40 bp, Artificial Sequence
  Description of Artificial Sequence: Synthetic primer
gtgatagagtgcagtgatgtttgccatttgctggacaacc

SEQ ID NO: 34455 - DNA, 40 bp, Artificial Sequence
  Description of Artificial Sequence: Synthetic primer
tctctccctcacatacacacacggaagacgtgactcacac

SEQ ID NO: 34456 - DNA, 40 bp, Artificial Sequence
  Description of Artificial Sequence: Synthetic primer
gaaaatactgaacatagctgtataggtttgtgattattag

SEQ ID NO: 34457 - DNA, 40 bp, Artificial Sequence
  Description of Artificial Sequence: Synthetic primer
gcattgactccatcagttcctataaataaaggtcccaaac

SEQ ID NO: 34458 - DNA, 40 bp, Artificial Sequence
  Description of Artificial Sequence: Synthetic primer
aaacaggtggtaaaaattctttctggcccagttaatttgc

SEQ ID NO: 34459 - DNA, 40 bp, Artificial Sequence
  Description of Artificial Sequence: Synthetic primer
ataacccattgggctgcccaaggccagccagcctgagctc

SEQ ID NO: 34460 - DNA, 40 bp, Artificial Sequence
  Description of Artificial Sequence: Synthetic primer
ccattcattctcaaaggccttcaactccaattacgagcag

SEQ ID NO: 34461 - DNA, 40 bp, Artificial Sequence
  Description of Artificial Sequence: Synthetic primer
agggtccctggattggcccagtgaggagcgtggccctgtc

SEQ ID NO: 34462 - DNA, 40 bp, Artificial Sequence
  Description of Artificial Sequence: Synthetic primer
aacgtctttttcgagagtctgcagcggcgcctgtcggtgt

SEQ ID NO: 34463 - DNA, 40 bp, Artificial Sequence
  Description of Artificial Sequence: Synthetic primer
aagtatgcaattttaatttggacacatggtaatttcagtc

SEQ ID NO: 34464 - DNA, 40 bp, Artificial Sequence
  Description of Artificial Sequence: Synthetic primer
ctctgggcagaggggagaccgcgggcccatcggcagcatc

SEQ ID NO: 34465 - DNA, 40 bp, Artificial Sequence
  Description of Artificial Sequence: Synthetic primer
gtcaaagagaaagaagcggagctcaaagaggcagagaaag

SEQ ID NO: 34466 - DNA, 40 bp, Artificial Sequence
  Description of Artificial Sequence: Synthetic primer
agcccaaaagttttgggtctaaatgccagctgtcagaaaa

SEQ ID NO: 34467 - DNA, 40 bp, Artificial Sequence
  Description of Artificial Sequence: Synthetic primer
ctaatgatttgcaatgtattttactggccaattaaaacag

SEQ ID NO: 34468 - DNA, 40 bp, Artificial Sequence
  Description of Artificial Sequence: Synthetic primer
aacaatagaatccactccctgggaaagaaatgctttgatg

SEQ ID NO: 34469 - DNA, 40 bp, Artificial Sequence
  Description of Artificial Sequence: Synthetic primer
tcatcatggacagctgtgatgagttgataccagagtatct

SEQ ID NO: 34470 - DNA, 40 bp, Artificial Sequence
  Description of Artificial Sequence: Synthetic primer
cagaggagacatgatttggctttgctggagcgccagtgtg

SEQ ID NO: 34471 - DNA, 40 bp, Artificial Sequence
  Description of Artificial Sequence: Synthetic primer
cccagtccttaaggccaaactgacagaaatgcgtggcatc

SEQ ID NO: 34472 - DNA, 40 bp, Artificial Sequence
  Description of Artificial Sequence: Synthetic primer
aaagtggggcccttcgtcagaatatacttcctggtacacg

SEQ ID NO: 34473 - DNA, 40 bp, Artificial Sequence
  Description of Artificial Sequence: Synthetic primer
ttactctgtgaaacatgctggattacaagcacagactacc

SEQ ID NO: 34474 - DNA, 40 bp, Artificial Sequence
  Description of Artificial Sequence: Synthetic primer
catgccattacagacagacgggaagtcactgggttctagg

SEQ ID NO: 34475 - DNA, 40 bp, Artificial Sequence
  Description of Artificial Sequence: Synthetic primer
actaatggcttatatggaaaatacagcgaccaactgattg

SEQ ID NO: 34476 - DNA, 40 bp, Artificial Sequence
  Description of Artificial Sequence: Synthetic primer
ggactccagtaggacccgcacccagcacttctcagtctca

SEQ ID NO: 34477 - DNA, 40 bp, Artificial Sequence
  Description of Artificial Sequence: Synthetic primer
tgcagaatagtcactctgctgtatatttgactggctcagg

SEQ ID NO: 34478 - DNA, 40 bp, Artificial Sequence
  Description of Artificial Sequence: Synthetic primer
gcccccatgcccacttgaggcctgatggcgtgaagccaaa

SEQ ID NO: 34479 - DNA, 40 bp, Artificial Sequence
  Description of Artificial Sequence: Synthetic primer
gggctgactgctctgctgggaatagccctgcccgggctgg

SEQ ID NO: 34480 - DNA, 40 bp, Artificial Sequence
  Description of Artificial Sequence: Synthetic primer
gctacagacacttccccggcccctaccgctgaggcacttc

SEQ ID NO: 34481 - DNA, 40 bp, Artificial Sequence
  Description of Artificial Sequence: Synthetic primer
aagaaatattttctctcctttatgatcagtgataccttag

SEQ ID NO: 34482 - DNA, 40 bp, Artificial Sequence
  Description of Artificial Sequence: Synthetic primer
tccatgccgcagacatgaaataaaagctttgcaaaggcac

SEQ ID NO: 34483 - DNA, 40 bp, Artificial Sequence
  Description of Artificial Sequence: Synthetic primer
gcatgagagaactgcagtggtcacagtgggtgctctgggg

SEQ ID NO: 34484 - DNA, 40 bp, Artificial Sequence
  Description of Artificial Sequence: Synthetic primer
atttaaagacttcctttgtatcagcttaagaactttcgtc

SEQ ID NO: 34485 - DNA, 40 bp, Artificial Sequence
  Description of Artificial Sequence: Synthetic primer
ctgttgcttacaaaggtcagaagatagagagaccaaagga

SEQ ID NO: 34486 - DNA, 40 bp, Artificial Sequence
  Description of Artificial Sequence: Synthetic primer
ccagattatgtggaggttgaccggataatggactttgcac

SEQ ID NO: 34487 - DNA, 40 bp, Artificial Sequence
  Description of Artificial Sequence: Synthetic primer
actggaactgagggaagagaatcccttgaaccacaacgtg

SEQ ID NO: 34488 - DNA, 40 bp, Artificial Sequence
  Description of Artificial Sequence: Synthetic primer
gtaggcggcggcccagtcgtccttgggcgcagggaagggc

SEQ ID NO: 34489 - DNA, 40 bp, Artificial Sequence
  Description of Artificial Sequence: Synthetic primer
aagtcaaaataaacctattgtaaaagcatttcgtgatgag

SEQ ID NO: 34490 - DNA, 40 bp, Artificial Sequence
  Description of Artificial Sequence: Synthetic primer
aggccattaagctggccaaggacgtggcgtccctcagttc

SEQ ID NO: 34491 - DNA, 40 bp, Artificial Sequence
  Description of Artificial Sequence: Synthetic primer
gttacaaggaattcagattcaggaggctgaaacgagagac

SEQ ID NO: 34492 - DNA, 40 bp, Artificial Sequence
  Description of Artificial Sequence: Synthetic primer
ggaaaagaaagcaaaaactgccacgccaaaacccaaatcc

SEQ ID NO: 34493 - DNA, 40 bp, Artificial Sequence
  Description of Artificial Sequence: Synthetic primer
aagaccaggaagtgctgcttcaaacgggcagggctctagg

SEQ ID NO: 34494 - DNA, 40 bp, Artificial Sequence
  Description of Artificial Sequence: Synthetic primer
gatctatcagtttcctacagatgatgagtcggtggcagag

SEQ ID NO: 34495 - DNA, 40 bp, Artificial Sequence
  Description of Artificial Sequence: Synthetic primer
gccctgaattaaaaagtaatgagacgtactgtactaatcc

SEQ ID NO: 34496 - DNA, 40 bp, Artificial Sequence
  Description of Artificial Sequence: Synthetic primer
gtagaaaactagcagcatcattctgggccatggggcattc

SEQ ID NO: 34497 - DNA, 40 bp, Artificial Sequence
  Description of Artificial Sequence: Synthetic primer
acctttcagcttcttctggagtcatgttcaatttatctgc

SEQ ID NO: 34498 - DNA, 40 bp, Artificial Sequence
  Description of Artificial Sequence: Synthetic primer
acagtttatagcaatctgtgtgctggtgataaaacaaaac

SEQ ID NO: 34499 - DNA, 40 bp, Artificial Sequence
  Description of Artificial Sequence: Synthetic primer
agcggggactacaagctcagcctggccggacgccggaaaa

SEQ ID NO: 34500 - DNA, 40 bp, Artificial Sequence
  Description of Artificial Sequence: Synthetic primer
tcagtttctgtgaagacgggaattacgcccgagtggagag

SEQ ID NO: 34501 - DNA, 40 bp, Artificial Sequence
  Description of Artificial Sequence: Synthetic primer
cagctggcctacgcggtgcttgcgagcctggcggcgcgcg

SEQ ID NO: 34502 - DNA, 40 bp, Artificial Sequence
  Description of Artificial Sequence: Synthetic primer
gttctcagaggacatggagaacatgctgcggaggaaagtc

SEQ ID NO: 34503 - DNA, 40 bp, Artificial Sequence
  Description of Artificial Sequence: Synthetic primer
gccaggtctgaaggatgctcagctgttccaggaagcgaag

SEQ ID NO: 34504 - DNA, 40 bp, Artificial Sequence
  Description of Artificial Sequence: Synthetic primer
aaagaacttcagaaaatcatcaaagatgttaacaaatcac

SEQ ID NO: 34505 - DNA, 40 bp, Artificial Sequence
  Description of Artificial Sequence: Synthetic primer
accaccagtcctgccacctttggacagctctaacaccatc

SEQ ID NO: 34506 - DNA, 40 bp, Artificial Sequence
  Description of Artificial Sequence: Synthetic primer
caaaaagctgtgtctgccctgaaggccagtggggttcaag

SEQ ID NO: 34507 - DNA, 40 bp, Artificial Sequence
  Description of Artificial Sequence: Synthetic primer
caaagtgtaaaccagtgcccctctgtcgccctgggctcag

SEQ ID NO: 34508 - DNA, 40 bp, Artificial Sequence
  Description of Artificial Sequence: Synthetic primer
aagatgtcagaataactaataattttattaggaaaaaatc

SEQ ID NO: 34509 - DNA, 40 bp, Artificial Sequence
  Description of Artificial Sequence: Synthetic primer
ttacttaattcatagccttccttggtttcatatttgtttg

SEQ ID NO: 34510 - DNA, 40 bp, Artificial Sequence
  Description of Artificial Sequence: Synthetic primer
tgctgaggagagaaaggtgagccaagggcagggcccaggt

SEQ ID NO: 34511 - DNA, 40 bp, Artificial Sequence
  Description of Artificial Sequence: Synthetic primer
gtttgctggaatgcagcaggagacaaagttggagccagtg

SEQ ID NO: 34512 - DNA, 40 bp, Artificial Sequence
  Description of Artificial Sequence: Synthetic primer
tctcccgctggtcagtctgggtggccaccaccagcacagg

SEQ ID NO: 34513 - DNA, 40 bp, Artificial Sequence
  Description of Artificial Sequence: Synthetic primer
ccaaaggcaacttggagatgcatttgctgacctgagtttg

SEQ ID NO: 34514 - DNA, 40 bp, Artificial Sequence
  Description of Artificial Sequence: Synthetic primer
aggaagaggaggaggatcccgacttccttccacttttagg

SEQ ID NO: 34515 - DNA, 40 bp, Artificial Sequence
  Description of Artificial Sequence: Synthetic primer
gccagggcacctactgagaggtgcggtcctgggggtggag

SEQ ID NO: 34516 - DNA, 40 bp, Artificial Sequence
  Description of Artificial Sequence: Synthetic primer
gctcagacaagaattactaaaggcaaacggtgaaattaaa

SEQ ID NO: 34517 - DNA, 40 bp, Artificial Sequence
  Description of Artificial Sequence: Synthetic primer
gagtcaagctagtcgtcggaccattcagttgtatgaaatg

SEQ ID NO: 34518 - DNA, 40 bp, Artificial Sequence
  Description of Artificial Sequence: Synthetic primer
acagtattttcaaacaagaaccgggagaagtcggtacaag

SEQ ID NO: 34519 - DNA, 40 bp, Artificial Sequence
  Description of Artificial Sequence: Synthetic primer
gcaagtgtcttttataaagttcacagtcttttcttgttgc

SEQ ID NO: 34520 - DNA, 40 bp, Artificial Sequence
  Description of Artificial Sequence: Synthetic primer
ggtcagagttcttcaaaaggtctgaaccaattatatctgt

SEQ ID NO: 34521 - DNA, 40 bp, Artificial Sequence
  Description of Artificial Sequence: Synthetic primer
ggaagtttcactggctggtggctgtcccttctcccatcag

SEQ ID NO: 34522 - DNA, 40 bp, Artificial Sequence
  Description of Artificial Sequence: Synthetic primer
acatgaagaactacaagggctacgagaagaagccctactg

SEQ ID NO: 34523 - DNA, 40 bp, Artificial Sequence
  Description of Artificial Sequence: Synthetic primer
ctgaattgtgttaggaatgcatggctggaaaaatgaaagg

SEQ ID NO: 34524 - DNA, 40 bp, Artificial Sequence
  Description of Artificial Sequence: Synthetic primer
gtgtttataggggttgaccaccacgcagaagaggccagag

SEQ ID NO: 34525 - DNA, 40 bp, Artificial Sequence
  Description of Artificial Sequence: Synthetic primer
taaaggcagacatcaacacccagggccgcattcactgtgc

SEQ ID NO: 34526 - DNA, 40 bp, Artificial Sequence
  Description of Artificial Sequence: Synthetic primer
catttagcaagagcagtttcattcacaagaatataaaaac

SEQ ID NO: 34527 - DNA, 40 bp, Artificial Sequence
  Description of Artificial Sequence: Synthetic primer
gtcaccattgccatagcagttgctggggcagttatccacc

SEQ ID NO: 34528 - DNA, 40 bp, Artificial Sequence
  Description of Artificial Sequence: Synthetic primer
catcgagggcatgctcctcaggctggaagagttttgcagc

SEQ ID NO: 34529 - DNA, 40 bp, Artificial Sequence
  Description of Artificial Sequence: Synthetic primer
cctgctgttctggaaagtcgtggatctggccaacaagaag

SEQ ID NO: 34530 - DNA, 40 bp, Artificial Sequence
  Description of Artificial Sequence: Synthetic primer
tgggtagtacagccccagagtccccaaagacaaactcatc

SEQ ID NO: 34531 - DNA, 40 bp, Artificial Sequence
  Description of Artificial Sequence: Synthetic primer
ttcactctgctttctgtataaagggcagtctgtggtcacg

SEQ ID NO: 34532 - DNA, 40 bp, Artificial Sequence
  Description of Artificial Sequence: Synthetic primer
aagacagacgtctacaaccagaaggtgtttgggctttcag

SEQ ID NO: 34533 - DNA, 40 bp, Artificial Sequence
  Description of Artificial Sequence: Synthetic primer
cacaggcaaagaggacaaaagcgtcccctgttggcctacc

SEQ ID NO: 34534 - DNA, 40 bp, Artificial Sequence
  Description of Artificial Sequence: Synthetic primer
tgacagatcatagtccgaactgggctccggccgctttctg

SEQ ID NO: 34535 - DNA, 40 bp, Artificial Sequence
  Description of Artificial Sequence: Synthetic primer
ggaagctgcgcagaactggggccgcgcgggacgcgccagc

SEQ ID NO: 34536 - DNA, 40 bp, Artificial Sequence
  Description of Artificial Sequence: Synthetic primer
atttccattttaaatgtatgtatgttacaactttacatat

SEQ ID NO: 34537 - DNA, 40 bp, Artificial Sequence
  Description of Artificial Sequence: Synthetic primer
tccccagtacgaagtgaatacagatccacacaacagtacg

SEQ ID NO: 34538 - DNA, 40 bp, Artificial Sequence
  Description of Artificial Sequence: Synthetic primer
gaaattgatgaagaaccagtcagtaaagcaaaacagagtc

SEQ ID NO: 34539 - DNA, 40 bp, Artificial Sequence
  Description of Artificial Sequence: Synthetic primer
ttctaaaaacgtaagtactccattgtaatagggtggcatc

SEQ ID NO: 34540 - DNA, 40 bp, Artificial Sequence
  Description of Artificial Sequence: Synthetic primer
agaagtgattgtggagcatacattaaaccaaaatggctac

SEQ ID NO: 34541 - DNA, 40 bp, Artificial Sequence
  Description of Artificial Sequence: Synthetic primer
caccgagacctagcactacagaggcacaaacatcacatgg

SEQ ID NO: 34542 - DNA, 40 bp, Artificial Sequence
  Description of Artificial Sequence: Synthetic primer
atgattgatcacagactaacagacagagaatgggcagaag

SEQ ID NO: 34543 - DNA, 40 bp, Artificial Sequence
  Description of Artificial Sequence: Synthetic primer
ctacaaactggccatttggagatgactgcatacttagagc

SEQ ID NO: 34544 - DNA, 40 bp, Artificial Sequence
  Description of Artificial Sequence: Synthetic primer
tttcagatccatttatgttttcatgctcaatacttactcc

SEQ ID NO: 34545 - DNA, 40 bp, Artificial Sequence
  Description of Artificial Sequence: Synthetic primer
aatttcctgaattgcctggtgacagctttggagaaacagg

SEQ ID NO: 34546 - DNA, 40 bp, Artificial Sequence
  Description of Artificial Sequence: Synthetic primer
gcatcatatagttcattttccccctccatgctgctgtgtg

SEQ ID NO: 34547 - DNA, 40 bp, Artificial Sequence
  Description of Artificial Sequence: Synthetic primer
tcctcccagagaagtggtccctcggccccgccctggtgtc

SEQ ID NO: 34548 - DNA, 40 bp, Artificial Sequence
  Description of Artificial Sequence: Synthetic primer
ctctgcacagcttgatagaaactcctgctaatgggactgg

SEQ ID NO: 34549 - DNA, 40 bp, Artificial Sequence
  Description of Artificial Sequence: Synthetic primer
gagaggcggcatggagcccgggatctccatcttcagcgtg

SEQ ID NO: 34550 - DNA, 40 bp, Artificial Sequence
  Description of Artificial Sequence: Synthetic primer
cgaacaggtgtattatccaaaggaaacttggagttgttac

SEQ ID NO: 34551 - DNA, 40 bp, Artificial Sequence
  Description of Artificial Sequence: Synthetic primer
accatttctgaaactcctccgctgacacggtagtcattag

SEQ ID NO: 34552 - DNA, 40 bp, Artificial Sequence
  Description of Artificial Sequence: Synthetic primer
cgaagtgtgaccttcctggagaaggtagttggtgcactgg

SEQ ID NO: 34553 - DNA, 40 bp, Artificial Sequence
  Description of Artificial Sequence: Synthetic primer
ccgtgtctggaactcctcaggcttcacccatgatcgagag

SEQ ID NO: 34554 - DNA, 40 bp, Artificial Sequence
  Description of Artificial Sequence: Synthetic primer
tgaatccttcagatcgatgttcttgaggaaaacagtcaag

SEQ ID NO: 34555 - DNA, 40 bp, Artificial Sequence
  Description of Artificial Sequence: Synthetic primer
tcaggattttcttccagccacctgggtagatccttcattg

SEQ ID NO: 34556 - DNA, 40 bp, Artificial Sequence
  Description of Artificial Sequence: Synthetic primer
ctggacacgtactccagggcattgcccacgttgatctgcc

SEQ ID NO: 34557 - DNA, 40 bp, Artificial Sequence
  Description of Artificial Sequence: Synthetic primer
gtctccagccacacgccgcctgtcagcggggccgacagcc

SEQ ID NO: 34558 - DNA, 40 bp, Artificial Sequence
  Description of Artificial Sequence: Synthetic primer
gatctcgtagccgccctgctgggcagccgcggctgcactg

SEQ ID NO: 34559 - DNA, 40 bp, Artificial Sequence
  Description of Artificial Sequence: Synthetic primer
gacacaggcctgggagccggagccttggaagggcgtgagg

SEQ ID NO: 34560 - DNA, 40 bp, Artificial Sequence
  Description of Artificial Sequence: Synthetic primer
atgtgagacatagcactgttttagttttctgcctatcctg

SEQ ID NO: 34561 - DNA, 40 bp, Artificial Sequence
  Description of Artificial Sequence: Synthetic primer
tgggctccagcttctccaggcgtctgcggagcccacagtt

SEQ ID NO: 34562 - DNA, 40 bp, Artificial Sequence
  Description of Artificial Sequence: Synthetic primer
cctgagagatggacaggaaagagatgcgccaattgtaaac

SEQ ID NO: 34563 - DNA, 40 bp, Artificial Sequence
  Description of Artificial Sequence: Synthetic primer
ctaataaatcattcttctatcacatggcagcacgctggag

SEQ ID NO: 34564 - DNA, 40 bp, Artificial Sequence
  Description of Artificial Sequence: Synthetic primer
agaaaaacaaaaacaaaaaccaacaacaattagccatagt

SEQ ID NO: 34565 - DNA, 40 bp, Artificial Sequence
  Description of Artificial Sequence: Synthetic primer
gttataaagctatggcaaaagcacagaaacccgcttgtgc

SEQ ID NO: 34566 - DNA, 40 bp, Artificial Sequence
  Description of Artificial Sequence: Synthetic primer
ttggggtctccacctctcccttgaaagcctccacgacctc

SEQ ID NO: 34567 - DNA, 40 bp, Artificial Sequence
  Description of Artificial Sequence: Synthetic primer
gaagcccgcattcaaacaggactgaaagaggtccagcttc

SEQ ID NO: 34568 - DNA, 40 bp, Artificial Sequence
  Description of Artificial Sequence: Synthetic primer
gtgaagaaacattatctttaaagtcatctgggaggtgcag

SEQ ID NO: 34569 - DNA, 40 bp, Artificial Sequence
  Description of Artificial Sequence: Synthetic primer
aatcatactgtctgctgatataatatcataattgttgtgg

SEQ ID NO: 34570 - DNA, 40 bp, Artificial Sequence
  Description of Artificial Sequence: Synthetic primer
aagaactggtccattgggtttggggctgtgattctgaaag

SEQ ID NO: 34571 - DNA, 40 bp, Artificial Sequence
  Description of Artificial Sequence: Synthetic primer
ataacaaactcagggaataccagttggagggagtaaactg

SEQ ID NO: 34572 - DNA, 40 bp, Artificial Sequence
  Description of Artificial Sequence: Synthetic primer
caaaatactgtgaataagtcttcaataaaatcactaatgg

SEQ ID NO: 34573 - DNA, 40 bp, Artificial Sequence
  Description of Artificial Sequence: Synthetic primer
gctgcttcagtgtaaccttggggcaatatgcccttttcag

SEQ ID NO: 34574 - DNA, 40 bp, Artificial Sequence
  Description of Artificial Sequence: Synthetic primer
tgtaagaaacagtgaagatgtgttgggagccctcattatc

SEQ ID NO: 34575 - DNA, 40 bp, Artificial Sequence
  Description of Artificial Sequence: Synthetic primer
taaacttttcctttaggcaaaatgtcagggaaaacttaac

SEQ ID NO: 34576 - DNA, 40 bp, Artificial Sequence
  Description of Artificial Sequence: Synthetic primer
tccatctctgccttttctagttccatttccaaatgttctc

SEQ ID NO: 34577 - DNA, 40 bp, Artificial Sequence
  Description of Artificial Sequence: Synthetic primer
gctcatgagaacaggacacccaggcgcgatcgtacacacg

SEQ ID NO: 34578 - DNA, 40 bp, Artificial Sequence
  Description of Artificial Sequence: Synthetic primer
gaattgcgctgggtcctagcaaactgtcgccttgtgactg

SEQ ID NO: 34579 - DNA, 40 bp, Artificial Sequence
  Description of Artificial Sequence: Synthetic primer
aaaacagacaggggtcttcggagtcaagattgctgtggtc

SEQ ID NO: 34580 - DNA, 40 bp, Artificial Sequence
  Description of Artificial Sequence: Synthetic primer
gagcaacagatggagaatcttgttgtttgcgttaagtacg

SEQ ID NO: 34581 - DNA, 40 bp, Artificial Sequence
  Description of Artificial Sequence: Synthetic primer
ggcggaggcggggcaggtgcgctcccggcggtcgcggctc

SEQ ID NO: 34582 - DNA, 40 bp, Artificial Sequence
  Description of Artificial Sequence: Synthetic primer
gatgtccacagctaacatgtacaccggcatgggtgggatg

SEQ ID NO: 34583 - DNA, 40 bp, Artificial Sequence
  Description of Artificial Sequence: Synthetic primer
acagatactgtgtggtcacgccagaactccgtgcggaggg

SEQ ID NO: 34584 - DNA, 40 bp, Artificial Sequence
  Description of Artificial Sequence: Synthetic primer
tgacaggtattggtgaaggagctaatgtttaatatttgac

SEQ ID NO: 34585 - DNA, 40 bp, Artificial Sequence
  Description of Artificial Sequence: Synthetic primer
aagctgcaatcactcttgcattgatttcaaaacagtaaac

SEQ ID NO: 34586 - DNA, 40 bp, Artificial Sequence
  Description of Artificial Sequence: Synthetic primer
tcacgttccttctgcgcaaaatacacttcttcaaccagag

SEQ ID NO: 34587 - DNA, 40 bp, Artificial Sequence
  Description of Artificial Sequence: Synthetic primer
tcttttccacagctcagtaacaattcaggatctgccatgc

SEQ ID NO: 34588 - DNA, 40 bp, Artificial Sequence
  Description of Artificial Sequence: Synthetic primer
ctgatagtgaatttcttttacctgacacagatgggctgac

SEQ ID NO: 34589 - DNA, 40 bp, Artificial Sequence
  Description of Artificial Sequence: Synthetic primer
gctctgcagccccttgcctccattgcagccgcagcaagag

SEQ ID NO: 34590 - DNA, 40 bp, Artificial Sequence
  Description of Artificial Sequence: Synthetic primer
aacacaggagagcgagcgcaagcccccaccatacaagcac

SEQ ID NO: 34591 - DNA, 40 bp, Artificial Sequence
  Description of Artificial Sequence: Synthetic primer
tgatcaccatgcggccatagagcggcggaatgagtacaac

SEQ ID NO: 34592 - DNA, 40 bp, Artificial Sequence
  Description of Artificial Sequence: Synthetic primer
ggtgacgggccgaggcacctcattagcttctaagaactcc

SEQ ID NO: 34593 - DNA, 40 bp, Artificial Sequence
  Description of Artificial Sequence: Synthetic primer
gttttgttacttaaatattaaaaacactgttatcctacag

SEQ ID NO: 34594 - DNA, 40 bp, Artificial Sequence
  Description of Artificial Sequence: Synthetic primer
tgctttctcactgaggtaaaacagcattaaaaagttgtcc

SEQ ID NO: 34595 - DNA, 40 bp, Artificial Sequence
  Description of Artificial Sequence: Synthetic primer
aagaatatttcattcccggctccagagcagaaaaatgtgc

SEQ ID NO: 34596 - DNA, 40 bp, Artificial Sequence
  Description of Artificial Sequence: Synthetic primer
ggttaatttattctgggaagctgttgttggatcaccaatg

SEQ ID NO: 34597 - DNA, 40 bp, Artificial Sequence
  Description of Artificial Sequence: Synthetic primer
agctcttctactacccccacagacctgctctggacacttg

SEQ ID NO: 34598 - DNA, 40 bp, Artificial Sequence
  Description of Artificial Sequence: Synthetic primer
gggctcagcacctaggacccaccagtggcggacctggttg

SEQ ID NO: 34599 - DNA, 40 bp, Artificial Sequence
  Description of Artificial Sequence: Synthetic primer
aagcttactacagctttatttgaggactttttaaagaacg

SEQ ID NO: 34600 - DNA, 40 bp, Artificial Sequence
  Description of Artificial Sequence: Synthetic primer
cgatccatgaggccacctcttcctccccgcatgccaccag

SEQ ID NO: 34601 - DNA, 40 bp, Artificial Sequence
  Description of Artificial Sequence: Synthetic primer
tcagctaaatttctgagctttatgatctgtggaaatttgg

SEQ ID NO: 34602 - DNA, 40 bp, Artificial Sequence
  Description of Artificial Sequence: Synthetic primer
accgtcatgtgtgacatcttcttctccctccgggaggcgg

SEQ ID NO: 34603 - DNA, 40 bp, Artificial Sequence
  Description of Artificial Sequence: Synthetic primer
ggggccggcccgcacgggcttcatctgagggcgcacggcc

SEQ ID NO: 34604 - DNA, 40 bp, Artificial Sequence
  Description of Artificial Sequence: Synthetic primer
tcccaggaattcatctccaaacttcaggttactggcattc

SEQ ID NO: 34605 - DNA, 40 bp, Artificial Sequence
  Description of Artificial Sequence: Synthetic primer
caacctggaggaggaggagccggaggactatgagctgctg

SEQ ID NO: 34606 - DNA, 40 bp, Artificial Sequence
  Description of Artificial Sequence: Synthetic primer
ggtttttctcaaagggggcatataactacatattgactgc

SEQ ID NO: 34607 - DNA, 40 bp, Artificial Sequence
  Description of Artificial Sequence: Synthetic primer
gtcctcaagcccagtaacaaagtgctgcaggtcagcatcg

SEQ ID NO: 34608 - DNA, 40 bp, Artificial Sequence
  Description of Artificial Sequence: Synthetic primer
cagattccttgttagatgcgaatgggggtccggtatgcac

SEQ ID NO: 34609 - DNA, 40 bp, Artificial Sequence
  Description of Artificial Sequence: Synthetic primer
atagctataaattgagtttaacaatttataaactcaagag

SEQ ID NO: 34610 - DNA, 40 bp, Artificial Sequence
  Description of Artificial Sequence: Synthetic primer
agagagtccagccacttcctgttgttgttgcataagtttc

SEQ ID NO: 34611 - DNA, 40 bp, Artificial Sequence
  Description of Artificial Sequence: Synthetic primer
agtgtgggccacctcaaggcccacctgagccgcgtctacc

SEQ ID NO: 34612 - DNA, 40 bp, Artificial Sequence
  Description of Artificial Sequence: Synthetic primer
tgaccacttgcccaggggatccaggttaaccccacgattg

SEQ ID NO: 34613 - DNA, 40 bp, Artificial Sequence
  Description of Artificial Sequence: Synthetic primer
tctgtgatctggtggaggagaagtttaagggcatcatctc

SEQ ID NO: 34614 - DNA, 40 bp, Artificial Sequence
  Description of Artificial Sequence: Synthetic primer
aagctaggaaagagctttatcacaagccttcactgtcctg

SEQ ID NO: 34615 - DNA, 40 bp, Artificial Sequence
  Description of Artificial Sequence: Synthetic primer
gctgggaacgtcagttgaagacatagcccaattcctgcac

SEQ ID NO: 34616 - DNA, 40 bp, Artificial Sequence
  Description of Artificial Sequence: Synthetic primer
atcatggcaagagctgggctgtctttcttccaccaaatgc

SEQ ID NO: 34617 - DNA, 40 bp, Artificial Sequence
  Description of Artificial Sequence: Synthetic primer
tccctgtcccctgcgtggggacaggccaagattcctctgg

SEQ ID NO: 34618 - DNA, 40 bp, Artificial Sequence
  Description of Artificial Sequence: Synthetic primer
tttggtcaacacggctttcctcgggtctccaaagatcctg

SEQ ID NO: 34619 - DNA, 40 bp, Artificial Sequence
  Description of Artificial Sequence: Synthetic primer
aaaactgagcagcgccaactccctgccagcgggcgagcag

SEQ ID NO: 34620 - DNA, 40 bp, Artificial Sequence
  Description of Artificial Sequence: Synthetic primer
catcagaattggaaggaaatgctgttgtttcttattccag

SEQ ID NO: 34621 - DNA, 40 bp, Artificial Sequence
  Description of Artificial Sequence: Synthetic primer
cttgaagaacaggattccacccaggcaaccacacaacaag

SEQ ID NO: 34622 - DNA, 40 bp, Artificial Sequence
  Description of Artificial Sequence: Synthetic primer
cccacccctcctgcattgcctggggatttgacagctgagg

SEQ ID NO: 34623 - DNA, 40 bp, Artificial Sequence
  Description of Artificial Sequence: Synthetic primer
gatgataacttggaattagaaatgaacagtgaatcggaaa

SEQ ID NO: 34624 - DNA, 40 bp, Artificial Sequence
  Description of Artificial Sequence: Synthetic primer
gagtcccttgagctgtccgaaaggggaggtgccggctcag

SEQ ID NO: 34625 - DNA, 40 bp, Artificial Sequence
  Description of Artificial Sequence: Synthetic primer
gtcccttggctgttgtgtttgtggtcacctgccaccgggg

SEQ ID NO: 34626 - DNA, 40 bp, Artificial Sequence
  Description of Artificial Sequence: Synthetic primer
acgtttacctttaaaactcagctgacttatggaagctcag

SEQ ID NO: 34627 - DNA, 40 bp, Artificial Sequence
  Description of Artificial Sequence: Synthetic primer
aaagggtaaagaactattcttggtcattattgatgtattg

SEQ ID NO: 34628 - DNA, 40 bp, Artificial Sequence
  Description of Artificial Sequence: Synthetic primer
gctgagctagcagtgagcaccttttggcccaatgaatatc

SEQ ID NO: 34629 - DNA, 40 bp, Artificial Sequence
  Description of Artificial Sequence: Synthetic primer
catgatggtgaccttcacgtctgtcacttccacaaactgc

SEQ ID NO: 34630 - DNA, 40 bp, Artificial Sequence
  Description of Artificial Sequence: Synthetic primer
cgagccgcctccgccagccccactgcgaggggtcccagag

SEQ ID NO: 34631 - DNA, 40 bp, Artificial Sequence
  Description of Artificial Sequence: Synthetic primer
cctgtcgtcagtgcagcgagctgaggcacttgtccgttcg

SEQ ID NO: 34632 - DNA, 40 bp, Artificial Sequence
  Description of Artificial Sequence: Synthetic primer
gaagaaagtccagacctcggagaagctgaaacatcatatc

SEQ ID NO: 34633 - DNA, 40 bp, Artificial Sequence
  Description of Artificial Sequence: Synthetic primer
gcgcttctgctgtggctacagcacttttttgtattccagg

SEQ ID NO: 34634 - DNA, 40 bp, Artificial Sequence
  Description of Artificial Sequence: Synthetic primer
atcaccgatgtcatcatggccttccaggcgatgtgtcgtg

SEQ ID NO: 34635 - DNA, 40 bp, Artificial Sequence
  Description of Artificial Sequence: Synthetic primer
aacttgatgttgaattttctgatggattaatatgggtttc

SEQ ID NO: 34636 - DNA, 40 bp, Artificial Sequence
  Description of Artificial Sequence: Synthetic primer
ctttcctggttccagcagatatatgcacgacagtactaca

SEQ ID NO: 34637 - DNA, 40 bp, Artificial Sequence
  Description of Artificial Sequence: Synthetic primer
atggtccacatctcaactaacagtattgacgctgtaagag

SEQ ID NO: 34638 - DNA, 40 bp, Artificial Sequence
  Description of Artificial Sequence: Synthetic primer
agcatgcagcactaagtgccctcagaaacctggccattcc

SEQ ID NO: 34639 - DNA, 40 bp, Artificial Sequence
  Description of Artificial Sequence: Synthetic primer
ccaggatccggggctttagccggcgggggaggtggtggac

SEQ ID NO: 34640 - DNA, 40 bp, Artificial Sequence
  Description of Artificial Sequence: Synthetic primer
ttcagtgtggatttctggtcactgggaattctagtgtatg

SEQ ID NO: 34641 - DNA, 40 bp, Artificial Sequence
  Description of Artificial Sequence: Synthetic primer
tcttgttgcctatcttcagttcttctgtgctgccaatgac

SEQ ID NO: 34642 - DNA, 40 bp, Artificial Sequence
  Description of Artificial Sequence: Synthetic primer
acactgcagcttgggggttttttctttgtattgctgttta

SEQ ID NO: 34643 - DNA, 40 bp, Artificial Sequence
  Description of Artificial Sequence: Synthetic primer
gagtcaacagacttgcaaacagctgaagtattccacttgc

SEQ ID NO: 34644 - DNA, 40 bp, Artificial Sequence
  Description of Artificial Sequence: Synthetic primer
cgtggggcgccgctcccgcctggcccaggacttcatggcc

SEQ ID NO: 34645 - DNA, 40 bp, Artificial Sequence
  Description of Artificial Sequence: Synthetic primer
gacagcagcatcttctcagctcggcggcagcgagctccgc

SEQ ID NO: 34646 - DNA, 40 bp, Artificial Sequence
  Description of Artificial Sequence: Synthetic primer
gcagagaaggaactcctctgaagcaagctccggagacttc

SEQ ID NO: 34647 - DNA, 40 bp, Artificial Sequence
  Description of Artificial Sequence: Synthetic primer
atggcagggtggtgccattcatcagtgccatcgccagcgc

SEQ ID NO: 34648 - DNA, 40 bp, Artificial Sequence
  Description of Artificial Sequence: Synthetic primer
gtcctaagagcccctctgcaatcccagagcaaaaccattc

SEQ ID NO: 34649 - DNA, 40 bp, Artificial Sequence
  Description of Artificial Sequence: Synthetic primer
aacaagttcctgaagttttctaattctttcacacttgtag

SEQ ID NO: 34650 - DNA, 40 bp, Artificial Sequence
  Description of Artificial Sequence: Synthetic primer
tacagttggacctgctggcattcgaggccctcagggtcac

SEQ ID NO: 34651 - DNA, 40 bp, Artificial Sequence
  Description of Artificial Sequence: Synthetic primer
aaaaagatattcctttatgttgtttaaaagtggcagctgc

SEQ ID NO: 34652 - DNA, 40 bp, Artificial Sequence
  Description of Artificial Sequence: Synthetic primer
ttgtgtcctccagatcgaagtccccatcggtgtcaaggac

SEQ ID NO: 34653 - DNA, 40 bp, Artificial Sequence
  Description of Artificial Sequence: Synthetic primer
agtttaaatatatgctttttccgatcaataattttaagag

SEQ ID NO: 34654 - DNA, 40 bp, Artificial Sequence
  Description of Artificial Sequence: Synthetic primer
agaggagttaaaaccacaacagtcagtctttggtcagagc

SEQ ID NO: 34655 - DNA, 40 bp, Artificial Sequence
  Description of Artificial Sequence: Synthetic primer
gttgtattcttcatggtctttctccatggctttattgatg

SEQ ID NO: 34656 - DNA, 40 bp, Artificial Sequence
  Description of Artificial Sequence: Synthetic primer
tggtggtctaacttctgcgttcttataaaattcttggttc

SEQ ID NO: 34657 - DNA, 40 bp, Artificial Sequence
  Description of Artificial Sequence: Synthetic primer
cctcatagccgatgttgatccatttgtctttcatgatttg

SEQ ID NO: 34658 - DNA, 40 bp, Artificial Sequence
  Description of Artificial Sequence: Synthetic primer
caaaccaaatcttagaatcacttcatttaaaatactgagc

SEQ ID NO: 34659 - DNA, 40 bp, Artificial Sequence
  Description of Artificial Sequence: Synthetic primer
tgacagccgttggctccaggacactcaagacatgtgatac

SEQ ID NO: 34660 - DNA, 40 bp, Artificial Sequence
  Description of Artificial Sequence: Synthetic primer
atagtcctccgtcctatacagtgtgggcagctcgtacgtc

SEQ ID NO: 34661 - DNA, 40 bp, Artificial Sequence
  Description of Artificial Sequence: Synthetic primer
tgcctttccatatcagcaaaatattcctttgcttctttag

SEQ ID NO: 34662 - DNA, 40 bp, Artificial Sequence
  Description of Artificial Sequence: Synthetic primer
actctacagaactgtttaccaaccacagacatctcactgc

SEQ ID NO: 34663 - DNA, 40 bp, Artificial Sequence
  Description of Artificial Sequence: Synthetic primer
cctggtacataatccataaagataaaaacgaaccaaattc

SEQ ID NO: 34664 - DNA, 40 bp, Artificial Sequence
  Description of Artificial Sequence: Synthetic primer
aaaaaggctgtcagcacttaaggaagcattttttcttcag

SEQ ID NO: 34665 - DNA, 40 bp, Artificial Sequence
  Description of Artificial Sequence: Synthetic primer
ctgcattgtgtgtttctttaaactcttccaaaattttctc

SEQ ID NO: 34666 - DNA, 40 bp, Artificial Sequence
  Description of Artificial Sequence: Synthetic primer
tgtgccctcccctcccttgctctctcccactagtcccttc

SEQ ID NO: 34667 - DNA, 40 bp, Artificial Sequence
  Description of Artificial Sequence: Synthetic primer
tggcaggctggacagctccccatgaagcgtggtcaggttg

SEQ ID NO: 34668 - DNA, 40 bp, Artificial Sequence
  Description of Artificial Sequence: Synthetic primer
ggacattggattttaaagaggaaaacactcattttcttag

SEQ ID NO: 34669 - DNA, 40 bp, Artificial Sequence
  Description of Artificial Sequence: Synthetic primer
ctaatggggaagctggatctgccggccctccaggacctcc

SEQ ID NO: 34670 - DNA, 40 bp, Artificial Sequence
  Description of Artificial Sequence: Synthetic primer
gatgtcgtcaatgcgaggctggtgcccctggatttctttc

SEQ ID NO: 34671 - DNA, 40 bp, Artificial Sequence
  Description of Artificial Sequence: Synthetic primer
tccccatagtttgccagctcgttgacaccccctagatcac

SEQ ID NO: 34672 - DNA, 40 bp, Artificial Sequence
  Description of Artificial Sequence: Synthetic primer
gaaacaccgaatgagtcaacgtccccaaacaccccggaac

SEQ ID NO: 34673 - DNA, 40 bp, Artificial Sequence
  Description of Artificial Sequence: Synthetic primer
tagaggaaattgggggacgaagagtggcagcactgacctg

SEQ ID NO: 34674 - DNA, 40 bp, Artificial Sequence
  Description of Artificial Sequence: Synthetic primer
ggcggtgattggccgcctgctggccgcgactgaggcccgg

SEQ ID NO: 34675 - DNA, 40 bp, Artificial Sequence
  Description of Artificial Sequence: Synthetic primer
ctccctatggacagctgcgtggccaccaagtccctgagtc

SEQ ID NO: 34676 - DNA, 40 bp, Artificial Sequence
  Description of Artificial Sequence: Synthetic primer
tctccctgccaagaaggccaggtggctttggtcagaatgg

SEQ ID NO: 34677 - DNA, 40 bp, Artificial Sequence
  Description of Artificial Sequence: Synthetic primer
cagaataataaggtggagatgcaggctccactttgattgc

SEQ ID NO: 34678 - DNA, 40 bp, Artificial Sequence
  Description of Artificial Sequence: Synthetic primer
aactgattatcgtgggaaatacttggttttcttcttctac

SEQ ID NO: 34679 - DNA, 40 bp, Artificial Sequence
  Description of Artificial Sequence: Synthetic primer
cttgaactccaggtcttcagtgtagcgctttctcttcacc

SEQ ID NO: 34680 - DNA, 40 bp, Artificial Sequence
  Description of Artificial Sequence: Synthetic primer
aagacctctgggccccttttcaccgggctctcccttatcg

SEQ ID NO: 34681 - DNA, 40 bp, Artificial Sequence
  Description of Artificial Sequence: Synthetic primer
ttccaaaagccacttgcttggcttcctaaggcgtttcttc

SEQ ID NO: 34682 - DNA, 40 bp, Artificial Sequence
  Description of Artificial Sequence: Synthetic primer
aacagggagcctggagggagaccttgatactttcaaatgc

SEQ ID NO: 34683 - DNA, 40 bp, Artificial Sequence
  Description of Artificial Sequence: Synthetic primer
cccaaaagtgatatggaaaactgtttgaatctgagcatgg

SEQ ID NO: 34684 - DNA, 40 bp, Artificial Sequence
  Description of Artificial Sequence: Synthetic primer
gaaggttctgttttgcatggtgtatgaatagccgttagag

SEQ ID NO: 34685 - DNA, 40 bp, Artificial Sequence
  Description of Artificial Sequence: Synthetic primer
gtcttctccaagcatagcagcccaatctttcatctttaac

SEQ ID NO: 34686 - DNA, 40 bp, Artificial Sequence
  Description of Artificial Sequence: Synthetic primer
atttgagaaactgtatgcagatggcgaaacaattcactac

SEQ ID NO: 34687 - DNA, 40 bp, Artificial Sequence
  Description of Artificial Sequence: Synthetic primer
gcgtctctacatagcgctccagggtggccaggttctcagg

SEQ ID NO: 34688 - DNA, 40 bp, Artificial Sequence
  Description of Artificial Sequence: Synthetic primer
ggattaacatttccatgcattatgaaacccggaggtggag

SEQ ID NO: 34689 - DNA, 40 bp, Artificial Sequence
  Description of Artificial Sequence: Synthetic primer
gttgccaaaaccatgtcaataatagcctggcgcagcgttc

SEQ ID NO: 34690 - DNA, 40 bp, Artificial Sequence
  Description of Artificial Sequence: Synthetic primer
ctccaactggcaaagataatgcttctgctgggctgaaacc

SEQ ID NO: 34691 - DNA, 40 bp, Artificial Sequence
  Description of Artificial Sequence: Synthetic primer
ccacgccggtgcaggacgtacagggcgacgggcgctggat

SEQ ID NO: 34692 - DNA, 40 bp, Artificial Sequence
  Description of Artificial Sequence: Synthetic primer
gagtcttgttctactgatctttcttctaggtctgactctg

SEQ ID NO: 34693 - DNA, 40 bp, Artificial Sequence
  Description of Artificial Sequence: Synthetic primer
agctgggctggaacgtgaactcagtagctgaacctgtctg

SEQ ID NO: 34694 - DNA, 40 bp, Artificial Sequence
  Description of Artificial Sequence: Synthetic primer
ggctgccttcctccggcccagtgttccacgccaccacgac

SEQ ID NO: 34695 - DNA, 40 bp, Artificial Sequence
  Description of Artificial Sequence: Synthetic primer
gaagaatcaagagttggtgcagatggaggacagttagagg

SEQ ID NO: 34696 - DNA, 40 bp, Artificial Sequence
  Description of Artificial Sequence: Synthetic primer
ctaaaatgaataagaggtgatggaccagtttactgcttag

SEQ ID NO: 34697 - DNA, 40 bp, Artificial Sequence
  Description of Artificial Sequence: Synthetic primer
aacttttttggtcactgtgcttcccaagcaccaaaaaatg

SEQ ID NO: 34698 - DNA, 40 bp, Artificial Sequence
  Description of Artificial Sequence: Synthetic primer
ctctgctcagagggacctgtactgggacgtgatgctggag

SEQ ID NO: 34699 - DNA, 40 bp, Artificial Sequence
  Description of Artificial Sequence: Synthetic primer
cttctttcaaactttaaaatgcacttgaaaatgcagatag

SEQ ID NO: 34700 - DNA, 40 bp, Artificial Sequence
  Description of Artificial Sequence: Synthetic primer
tacacaacatcagaaaacgcacagtggggcgaaatcctac

SEQ ID NO: 34701 - DNA, 40 bp, Artificial Sequence
  Description of Artificial Sequence: Synthetic primer
gaggctggttttattttgcctttccctcaccgcccagtcc

SEQ ID NO: 34702 - DNA, 40 bp, Artificial Sequence
  Description of Artificial Sequence: Synthetic primer
atcttcacgccacatctacttcatggcacagatttgctac

SEQ ID NO: 34703 - DNA, 40 bp, Artificial Sequence
  Description of Artificial Sequence: Synthetic primer
attctcctggggccagggcgggcacctcaggcctggaaac

SEQ ID NO: 34704 - DNA, 40 bp, Artificial Sequence
  Description of Artificial Sequence: Synthetic primer
accgaaatctcttcaggatcccgtgtttctgacaatgctg

SEQ ID NO: 34705 - DNA, 40 bp, Artificial Sequence
  Description of Artificial Sequence: Synthetic primer
gatagagacaggtctcatcgggaggaaatggaggtgagag

SEQ ID NO: 34706 - DNA, 40 bp, Artificial Sequence
  Description of Artificial Sequence: Synthetic primer
actgtgacctgagcagctcttcaatctcctcacctgaagc

SEQ ID NO: 34707 - DNA, 40 bp, Artificial Sequence
  Description of Artificial Sequence: Synthetic primer
gttttgcttctttatcctgaaaatcagatttacaatgctg

SEQ ID NO: 34708 - DNA, 40 bp, Artificial Sequence
  Description of Artificial Sequence: Synthetic primer
atttagaacatacccattatattcaaaatatattaaatcc

SEQ ID NO: 34709 - DNA, 40 bp, Artificial Sequence
  Description of Artificial Sequence: Synthetic primer
tccccacgagggccccggttcccgattcctccttttggtc

SEQ ID NO: 34710 - DNA, 40 bp, Artificial Sequence
  Description of Artificial Sequence: Synthetic primer
tgggaatgaattgaatcgaaaaaacaaaccacaaaatatc

SEQ ID NO: 34711 - DNA, 40 bp, Artificial Sequence
  Description of Artificial Sequence: Synthetic primer
ccaacaccccgggagctgcccggtcaggggaggagggcag

SEQ ID NO: 34712 - DNA, 40 bp, Artificial Sequence
  Description of Artificial Sequence: Synthetic primer
gccaaacacggggggcaatccagccaggagggcgtaggcc

SEQ ID NO: 34713 - DNA, 40 bp, Artificial Sequence
  Description of Artificial Sequence: Synthetic primer
gaagatgtcatcggggactccggaattcttcagactgttg

SEQ ID NO: 34714 - DNA, 40 bp, Artificial Sequence
  Description of Artificial Sequence: Synthetic primer
gttccagaagtgtccccattttacaactttatgcacacac

SEQ ID NO: 34715 - DNA, 40 bp, Artificial Sequence
  Description of Artificial Sequence: Synthetic primer
cacccggaggaatttctgccgccagtgaaagcccctccag

SEQ ID NO: 34716 - DNA, 40 bp, Artificial Sequence
  Description of Artificial Sequence: Synthetic primer
tcaaaggggcctgatacttggagagagtggagttctgatg

SEQ ID NO: 34717 - DNA, 40 bp, Artificial Sequence
  Description of Artificial Sequence: Synthetic primer
atgggctgtgcaaacatgaccggctgctgaggcatcatgg

SEQ ID NO: 34718 - DNA, 40 bp, Artificial Sequence
  Description of Artificial Sequence: Synthetic primer
gtgctcagccctgcggatctgctgccggttctgccagatg

SEQ ID NO: 34719 - DNA, 40 bp, Artificial Sequence
  Description of Artificial Sequence: Synthetic primer
gaagaacaggaactgcaagctgttggagggactcaagatg

SEQ ID NO: 34720 - DNA, 40 bp, Artificial Sequence
  Description of Artificial Sequence: Synthetic primer
cgcagaattcccacaatatcctggatccgcttgtgaactc

SEQ ID NO: 34721 - DNA, 40 bp, Artificial Sequence
  Description of Artificial Sequence: Synthetic primer
tcagcaacatgcccagcacccccgcctcgaccatctctgc

SEQ ID NO: 34722 - DNA, 40 bp, Artificial Sequence
  Description of Artificial Sequence: Synthetic primer
ggtgtccaaggaactggcccgcaaggccgtcgtggtcttc

SEQ ID NO: 34723 - DNA, 40 bp, Artificial Sequence
  Description of Artificial Sequence: Synthetic primer
ctggctcagcgcctggaagaactgggcgttggcgctgaag

SEQ ID NO: 34724 - DNA, 40 bp, Artificial Sequence
  Description of Artificial Sequence: Synthetic primer
cttcccttcgtgcagcaggcacagggcgtaggagccgttg

SEQ ID NO: 34725 - DNA, 40 bp, Artificial Sequence
  Description of Artificial Sequence: Synthetic primer
cagtgatttggcagagtctccctctgttaatatcagtgta

SEQ ID NO: 34726 - DNA, 40 bp, Artificial Sequence
  Description of Artificial Sequence: Synthetic primer
caagtagcacagagtgatggggaggagagccctgctgctg

SEQ ID NO: 34727 - DNA, 40 bp, Artificial Sequence
  Description of Artificial Sequence: Synthetic primer
agcggcatttctgccgctacaagaagacactcaagaattg

SEQ ID NO: 34728 - DNA, 40 bp, Artificial Sequence
  Description of Artificial Sequence: Synthetic primer
gccaagatgatcaatctgatgaggccaggagtctttgctg

SEQ ID NO: 34729 - DNA, 40 bp, Artificial Sequence
  Description of Artificial Sequence: Synthetic primer
ggaggaaacccccaagttctgcagccagtgcggagagagg

SEQ ID NO: 34730 - DNA, 40 bp, Artificial Sequence
  Description of Artificial Sequence: Synthetic primer
attgacatcactgtgcggcacatcgcagacctgtcaccag

SEQ ID NO: 34731 - DNA, 40 bp, Artificial Sequence
  Description of Artificial Sequence: Synthetic primer
accaagtttactgtttcttgaacagaataggaagaaaata

SEQ ID NO: 34732 - DNA, 40 bp, Artificial Sequence
  Description of Artificial Sequence: Synthetic primer
acagaaatcctgggaacatcagagtgcgagcttaaagtca

SEQ ID NO: 34733 - DNA, 40 bp, Artificial Sequence
  Description of Artificial Sequence: Synthetic primer
gggagagaagtgtcttttgctgaccgcatgaagtggattg

SEQ ID NO: 34734 - DNA, 40 bp, Artificial Sequence
  Description of Artificial Sequence: Synthetic primer
atggtgatctgtattcaaagaaaaaatatctggtgtgcac

SEQ ID NO: 34735 - DNA, 40 bp, Artificial Sequence
  Description of Artificial Sequence: Synthetic primer
gcacctcctgggcaggtacaatgactccattggccacgag

SEQ ID NO: 34736 - DNA, 40 bp, Artificial Sequence
  Description of Artificial Sequence: Synthetic primer
gagcctggtgtattttcccccaccccacctcagcagtttc

SEQ ID NO: 34737 - DNA, 40 bp, Artificial Sequence
  Description of Artificial Sequence: Synthetic primer
tttattagtggtacagcggtactggtgatgaataggttac

SEQ ID NO: 34738 - DNA, 40 bp, Artificial Sequence
  Description of Artificial Sequence: Synthetic primer
aaggaatttgatgaggactcggaggaccggctggtgaacg

SEQ ID NO: 34739 - DNA, 40 bp, Artificial Sequence
  Description of Artificial Sequence: Synthetic primer
caagatcctgctgcttccgtcaccacagtctccagccaag

SEQ ID NO: 34740 - DNA, 40 bp, Artificial Sequence
  Description of Artificial Sequence: Synthetic primer
cttctgtcacacaagcaacgcagaatttggaggtgggttc

SEQ ID NO: 34741 - DNA, 40 bp, Artificial Sequence
  Description of Artificial Sequence: Synthetic primer
taagctgcagaccaagcctttgcccagaatttaaggattc

SEQ ID NO: 34742 - DNA, 40 bp, Artificial Sequence
  Description of Artificial Sequence: Synthetic primer
tgtctctaccaggattcacaatagcgccttcttcaatgtc

SEQ ID NO: 34743 - DNA, 40 bp, Artificial Sequence
  Description of Artificial Sequence: Synthetic primer
acttaattccatttccaatgaaatggatttttaaaaattt

SEQ ID NO: 34744 - DNA, 40 bp, Artificial Sequence
  Description of Artificial Sequence: Synthetic primer
agagtgcccgcgggagctggagaacgccaagaacatgctg

SEQ ID NO: 34745 - DNA, 40 bp, Artificial Sequence
  Description of Artificial Sequence: Synthetic primer
taaacatattgacttaacatcaggtcttctggagtaggtg

SEQ ID NO: 34746 - DNA, 40 bp, Artificial Sequence
  Description of Artificial Sequence: Synthetic primer
tcctatatttttttaatccttggagcagtagtttttatac

SEQ ID NO: 34747 - DNA, 40 bp, Artificial Sequence
  Description of Artificial Sequence: Synthetic primer
gacccgctgcttcatctgccgtgtgcgctgcctgctggac

SEQ ID NO: 34748 - DNA, 40 bp, Artificial Sequence
  Description of Artificial Sequence: Synthetic primer
ccgactgcagcagcttgatctgggcgatcacctcgaactc

SEQ ID NO: 34749 - DNA, 40 bp, Artificial Sequence
  Description of Artificial Sequence: Synthetic primer
acatggacagattttctttttaatacataacttaagagac

SEQ ID NO: 34750 - DNA, 40 bp, Artificial Sequence
  Description of Artificial Sequence: Synthetic primer
gaaaagtgtaaacagcttcagaggacaggggtgaataagg

SEQ ID NO: 34751 - DNA, 40 bp, Artificial Sequence
  Description of Artificial Sequence: Synthetic primer
gcctcgagaacacctgtcaggttatgaaggttagaagttc

SEQ ID NO: 34752 - DNA, 40 bp, Artificial Sequence
  Description of Artificial Sequence: Synthetic primer
taggccctttggctcctctttctcctttagcaccaggttg

SEQ ID NO: 34753 - DNA, 40 bp, Artificial Sequence
  Description of Artificial Sequence: Synthetic primer
agctgccctgagaggagagggcactgcagaagtccagctt

SEQ ID NO: 34754 - DNA, 40 bp, Artificial Sequence
  Description of Artificial Sequence: Synthetic primer
gccagacacatacccaagcgactggtcagaggtgacatgc

SEQ ID NO: 34755 - DNA, 40 bp, Artificial Sequence
  Description of Artificial Sequence: Synthetic primer
gagtaacagaatcccacactctgacgtggggttgtagagg

SEQ ID NO: 34756 - DNA, 40 bp, Artificial Sequence
  Description of Artificial Sequence: Synthetic primer
gggaacagatgggcagaaatcgcaaagctactgcctggac

SEQ ID NO: 34757 - DNA, 40 bp, Artificial Sequence
  Description of Artificial Sequence: Synthetic primer
aaggaacctgctgataagtacaagtgtgaccatctcattc

SEQ ID NO: 34758 - DNA, 40 bp, Artificial Sequence
  Description of Artificial Sequence: Synthetic primer
agacacgtacccacagaagctctgcagaatttgcgaagcc

SEQ ID NO: 34759 - DNA, 40 bp, Artificial Sequence
  Description of Artificial Sequence: Synthetic primer
ggtaaactgattgaagtagttaagaaaaagaacaaagctg

SEQ ID NO: 34760 - DNA, 40 bp, Artificial Sequence
  Description of Artificial Sequence: Synthetic primer
agtgtgatgaggtccttttgtgtactgagagatggacagg

SEQ ID NO: 34761 - DNA, 40 bp, Artificial Sequence
  Description of Artificial Sequence: Synthetic primer
tctactttgtcgttaacatcgaaaacacgatcatgaacac

SEQ ID NO: 34762 - DNA, 40 bp, Artificial Sequence
  Description of Artificial Sequence: Synthetic primer
caggagaagaaagggtgcctgttgtcaataaacgaaatgg

SEQ ID NO: 34763 - DNA, 40 bp, Artificial Sequence
  Description of Artificial Sequence: Synthetic primer
ggtgtataacttcttttcagataaacagaaaagcttactg

SEQ ID NO: 34764 - DNA, 40 bp, Artificial Sequence
  Description of Artificial Sequence: Synthetic primer
gttccttcttctctctctttctctttgggtgacagcaatg

SEQ ID NO: 34765 - DNA, 40 bp, Artificial Sequence
  Description of Artificial Sequence: Synthetic primer
tcactttaaggaggatctggtgagcctgagaaagcaaacc

SEQ ID NO: 34766 - DNA, 40 bp, Artificial Sequence
  Description of Artificial Sequence: Synthetic primer
tacaagagacattgaatgggctacctatacctgcactttg

SEQ ID NO: 34767 - DNA, 40 bp, Artificial Sequence
  Description of Artificial Sequence: Synthetic primer
aaatctgatgcatcttccggccacactccttgcaatcaac

SEQ ID NO: 34768 - DNA, 40 bp, Artificial Sequence
  Description of Artificial Sequence: Synthetic primer
tcaatttatagaggttaggaattccaaactacagaaaatg

SEQ ID NO: 34769 - DNA, 40 bp, Artificial Sequence
  Description of Artificial Sequence: Synthetic primer
gaggctttagctgcagtattgacttatgcaaagccggatg

SEQ ID NO: 34770 - DNA, 40 bp, Artificial Sequence
  Description of Artificial Sequence: Synthetic primer
taactcattctctgacctgccgccaattagaaaacaactg

SEQ ID NO: 34771 - DNA, 40 bp, Artificial Sequence
  Description of Artificial Sequence: Synthetic primer
aggtataatccagagcaaacaaaagtcctttcagctagtc

SEQ ID NO: 34772 - DNA, 40 bp, Artificial Sequence
  Description of Artificial Sequence: Synthetic primer
ctagaaggaagctcccttaataagaagcaaggattattcg

SEQ ID NO: 34773 - DNA, 40 bp, Artificial Sequence
  Description of Artificial Sequence: Synthetic primer
gtaactaagaagctgctacatttttaagcagggaggaaaa

SEQ ID NO: 34774 - DNA, 40 bp, Artificial Sequence
  Description of Artificial Sequence: Synthetic primer
tcgtttgtaaatttctagagcatctttacattgtcctttc

SEQ ID NO: 34775 - DNA, 40 bp, Artificial Sequence
  Description of Artificial Sequence: Synthetic primer
gacaaggctccaggccccacctcctcctccatacgttcag

SEQ ID NO: 34776 - DNA, 40 bp, Artificial Sequence
  Description of Artificial Sequence: Synthetic primer
tctgtggcttatagcctgcccctcctacagggtcattttc

SEQ ID NO: 34777 - DNA, 40 bp, Artificial Sequence
  Description of Artificial Sequence: Synthetic primer
aaacacagacgtctttccaaatagctcgccacacaacagc

SEQ ID NO: 34778 - DNA, 40 bp, Artificial Sequence
  Description of Artificial Sequence: Synthetic primer
gtataatactactgtgagtaaaagtaatactttaataatg

SEQ ID NO: 34779 - DNA, 40 bp, Artificial Sequence
  Description of Artificial Sequence: Synthetic primer
tgaacttcttttgtcagagatgaattttctgttcttattg

SEQ ID NO: 34780 - DNA, 40 bp, Artificial Sequence
  Description of Artificial Sequence: Synthetic primer
cagattcaacagcagaaacgcttgttgaatggcttcagag

SEQ ID NO: 34781 - DNA, 40 bp, Artificial Sequence
  Description of Artificial Sequence: Synthetic primer
ttggcagctgttgctcggggacgcctcgcgctccgagggc

SEQ ID NO: 34782 - DNA, 40 bp, Artificial Sequence
  Description of Artificial Sequence: Synthetic primer
agtgtctccagtgtctacgaacaacatgagagcacacctc

SEQ ID NO: 34783 - DNA, 40 bp, Artificial Sequence
  Description of Artificial Sequence: Synthetic primer
atagaatcttaaagcatttttgatgttactcatagttttg

SEQ ID NO: 34784 - DNA, 40 bp, Artificial Sequence
  Description of Artificial Sequence: Synthetic primer
cgtctgcccctgcccggctcccggcggccccagctgtcac

SEQ ID NO: 34785 - DNA, 40 bp, Artificial Sequence
  Description of Artificial Sequence: Synthetic primer
ttgaaatacactaccttttcctccttcaaataacttctgc

SEQ ID NO: 34786 - DNA, 40 bp, Artificial Sequence
  Description of Artificial Sequence: Synthetic primer
cctggcggaggttgcctcttactcggccgtcgatcctttc

SEQ ID NO: 34787 - DNA, 40 bp, Artificial Sequence
  Description of Artificial Sequence: Synthetic primer
actttttcgtgtagactttttctctccatgttactaaaac

SEQ ID NO: 34788 - DNA, 40 bp, Artificial Sequence
  Description of Artificial Sequence: Synthetic primer
ttggcaatgacatttcacccgagataggagaaagagttcg

SEQ ID NO: 34789 - DNA, 40 bp, Artificial Sequence
  Description of Artificial Sequence: Synthetic primer
tagaaatttcagtagccattttcacattttccttcactgc

SEQ ID NO: 34790 - DNA, 40 bp, Artificial Sequence
  Description of Artificial Sequence: Synthetic primer
cccttggtgagaaggcttcatgaaattcttacgagaataa

SEQ ID NO: 34791 - DNA, 40 bp, Artificial Sequence
  Description of Artificial Sequence: Synthetic primer
cttaaactttagttttctctgttctttatcttctttagcc

SEQ ID NO: 34792 - DNA, 40 bp, Artificial Sequence
  Description of Artificial Sequence: Synthetic primer
aggatttgttggatctggtgcaccctctcggctgggttct

SEQ ID NO: 34793 - DNA, 40 bp, Artificial Sequence
  Description of Artificial Sequence: Synthetic primer
tgaagttctcacggaagttcatcaggggcttctccacctc

SEQ ID NO: 34794 - DNA, 40 bp, Artificial Sequence
  Description of Artificial Sequence: Synthetic primer
ggccttcttcaccagctaccagtacatggagagcaccgtg

SEQ ID NO: 34795 - DNA, 40 bp, Artificial Sequence
  Description of Artificial Sequence: Synthetic primer
atgtcaaaagcagaaatataacatacaggggattggtaag

SEQ ID NO: 34796 - DNA, 40 bp, Artificial Sequence
  Description of Artificial Sequence: Synthetic primer
ttaaagattttcaaatctttataaatcaatattaatgctg

SEQ ID NO: 34797 - DNA, 40 bp, Artificial Sequence
  Description of Artificial Sequence: Synthetic primer
ctggcacctaggagcgcagcggagccccgacaccgccgcc

SEQ ID NO: 34798 - DNA, 40 bp, Artificial Sequence
  Description of Artificial Sequence: Synthetic primer
ctctgctgctgccgtcaccatcggctttggacagatcaag

SEQ ID NO: 34799 - DNA, 40 bp, Artificial Sequence
  Description of Artificial Sequence: Synthetic primer
aaactggcctgaaaaaaacttttttgacttgtttcataag

SEQ ID NO: 34800 - DNA, 40 bp, Artificial Sequence
  Description of Artificial Sequence: Synthetic primer
tgcggagcacccagcgcacccagagcaacctgcccaccag

SEQ ID NO: 34801 - DNA, 40 bp, Artificial Sequence
  Description of Artificial Sequence: Synthetic primer
tcatggaataccttctgtgttaaatacagtcacttaattc

SEQ ID NO: 34802 - DNA, 40 bp, Artificial Sequence
  Description of Artificial Sequence: Synthetic primer
tctgcagcagcagcaacagcacggaaacggtgcggtggcg

SEQ ID NO: 34803 - DNA, 40 bp, Artificial Sequence
  Description of Artificial Sequence: Synthetic primer
gctacaaaacgcgcagatgtgcagcagattggaaggagac

SEQ ID NO: 34804 - DNA, 40 bp, Artificial Sequence
  Description of Artificial Sequence: Synthetic primer
cctgccacagcggcttcgagctctcctctgatggcaggac

SEQ ID NO: 34805 - DNA, 40 bp, Artificial Sequence
  Description of Artificial Sequence: Synthetic primer
cacagacaaggctttcgtcctcattaggtgttggcctcag

SEQ ID NO: 34806 - DNA, 40 bp, Artificial Sequence
  Description of Artificial Sequence: Synthetic primer
tacaaaccaaatacttttgggggagaggctttcaagtgac

SEQ ID NO: 34807 - DNA, 40 bp, Artificial Sequence
  Description of Artificial Sequence: Synthetic primer
atgaaggaaagactatgatttactgcatcacttgtaggac

SEQ ID NO: 34808 - DNA, 40 bp, Artificial Sequence
  Description of Artificial Sequence: Synthetic primer
ggaagacatgaaagtcatggccaagggtgtctgttgtgac

SEQ ID NO: 34809 - DNA, 40 bp, Artificial Sequence
  Description of Artificial Sequence: Synthetic primer
ctactttgctatcaaacaagaagtcgtcaccccagacaac

SEQ ID NO: 34810 - DNA, 40 bp, Artificial Sequence
  Description of Artificial Sequence: Synthetic primer
acagccagagatgctgcccgggtacaggtggcctccacac

SEQ ID NO: 34811 - DNA, 40 bp, Artificial Sequence
  Description of Artificial Sequence: Synthetic primer
ctgttctgaccaggcgtcctctgcccccagggagaggctg

SEQ ID NO: 34812 - DNA, 40 bp, Artificial Sequence
  Description of Artificial Sequence: Synthetic primer
aggtcttctcctccagatgcagaagcaccttggccagctc

SEQ ID NO: 34813 - DNA, 40 bp, Artificial Sequence
  Description of Artificial Sequence: Synthetic primer
tgctgattgcaaataggcatttaaaatgtgaatttggaat

SEQ ID NO: 34814 - DNA, 40 bp, Artificial Sequence
  Description of Artificial Sequence: Synthetic primer
gaaggtcgtcaggaaggctctgacagtcattgatttcacc

SEQ ID NO: 34815 - DNA, 40 bp, Artificial Sequence
  Description of Artificial Sequence: Synthetic primer
caaaggcaagagtaacagcagcgccgtcccgtccgacagc

SEQ ID NO: 34816 - DNA, 40 bp, Artificial Sequence
  Description of Artificial Sequence: Synthetic primer
gtgctcaaaagaacttgttgatgtttctaaaatgttcagg

SEQ ID NO: 34817 - DNA, 40 bp, Artificial Sequence
  Description of Artificial Sequence: Synthetic primer
tctttctcgttaaatttggcactgcgctttacatagattc

SEQ ID NO: 34818 - DNA, 40 bp, Artificial Sequence
  Description of Artificial Sequence: Synthetic primer
ctatttattttgagtctgtgaggtcttcttgtcatgtgag

SEQ ID NO: 34819 - DNA, 40 bp, Artificial Sequence
  Description of Artificial Sequence: Synthetic primer
catggctaaatggaaagcctgtggtatattctaactggtc

SEQ ID NO: 34820 - DNA, 40 bp, Artificial Sequence
  Description of Artificial Sequence: Synthetic primer
tggcagctgtgattcataaatcgagagtagtttcctttgg

SEQ ID NO: 34821 - DNA, 40 bp, Artificial Sequence
  Description of Artificial Sequence: Synthetic primer
ctgcgttgtcccgatgatttacatcacaaatcttgttctc

SEQ ID NO: 34822 - DNA, 40 bp, Artificial Sequence
  Description of Artificial Sequence: Synthetic primer
ttacgaactcactgagctggaagtcattcaacgggaattg

SEQ ID NO: 34823 - DNA, 40 bp, Artificial Sequence
  Description of Artificial Sequence: Synthetic primer
ataataagaaagaatacagcaatcattccattttctcacc

SEQ ID NO: 34824 - DNA, 40 bp, Artificial Sequence
  Description of Artificial Sequence: Synthetic primer
cttgaaccatgcccactacctagagaacctgcacttcacc

SEQ ID NO: 34825 - DNA, 40 bp, Artificial Sequence
  Description of Artificial Sequence: Synthetic primer
tcagtccattattttggatcatttaaactgaacattacac

SEQ ID NO: 34826 - DNA, 40 bp, Artificial Sequence
  Description of Artificial Sequence: Synthetic primer
tttgagaagctggtttgaaagtcagatcaccatcctggac

SEQ ID NO: 34827 - DNA, 40 bp, Artificial Sequence
  Description of Artificial Sequence: Synthetic primer
tgacatgaaaccatgttattcttatcttcttaaaacacag

SEQ ID NO: 34828 - DNA, 40 bp, Artificial Sequence
  Description of Artificial Sequence: Synthetic primer
gagttacattattaagcaaggagaaccaggaaaccatatc

SEQ ID NO: 34829 - DNA, 40 bp, Artificial Sequence
  Description of Artificial Sequence: Synthetic primer
ggagggatttcaacatccccatccacttccatcatatcag

SEQ ID NO: 34830 - DNA, 40 bp, Artificial Sequence
  Description of Artificial Sequence: Synthetic primer
gagataatttcttggccttggagaagaagacacaaacatc

SEQ ID NO: 34831 - DNA, 40 bp, Artificial Sequence
  Description of Artificial Sequence: Synthetic primer
ttcctgaaggcagtcattttctcggctcacatcttcatac

SEQ ID NO: 34832 - DNA, 40 bp, Artificial Sequence
  Description of Artificial Sequence: Synthetic primer
aacagctgtttttattttacctctttggcctaaagttttc

SEQ ID NO: 34833 - DNA, 40 bp, Artificial Sequence
  Description of Artificial Sequence: Synthetic primer
ctctcttcaaatcatgtgactttttaaatggaagtttttc

SEQ ID NO: 34834 - DNA, 40 bp, Artificial Sequence
  Description of Artificial Sequence: Synthetic primer
cttccccaggcctgcgtccgagtctccgccgctgcgggcc

SEQ ID NO: 34835 - DNA, 40 bp, Artificial Sequence
  Description of Artificial Sequence: Synthetic primer
gaatgttctggttttgagacttcaaggcaagattgagaag

SEQ ID NO: 34836 - DNA, 40 bp, Artificial Sequence
  Description of Artificial Sequence: Synthetic primer
aacaaaaaagacatatcttattcggacacttaaaattttc

SEQ ID NO: 34837 - DNA, 40 bp, Artificial Sequence
  Description of Artificial Sequence: Synthetic primer
gggaaggccagcggggccgccctcttggccagcggcagcc

SEQ ID NO: 34838 - DNA, 40 bp, Artificial Sequence
  Description of Artificial Sequence: Synthetic primer
tcctcggaaaactggaaatggtgaaggccgtgcaacttcg

SEQ ID NO: 34839 - DNA, 40 bp, Artificial Sequence
  Description of Artificial Sequence: Synthetic primer
ccaacatcatctgttactagcgagaactcagaagtgttcc

SEQ ID NO: 34840 - DNA, 40 bp, Artificial Sequence
  Description of Artificial Sequence: Synthetic primer
ctcattgaagaatgtgaacaagctgaacgacttggagcag

SEQ ID NO: 34841 - DNA, 40 bp, Artificial Sequence
  Description of Artificial Sequence: Synthetic primer
accctggctatggccagcagccagctcccagcagcacctc

SEQ ID NO: 34842 - DNA, 40 bp, Artificial Sequence
  Description of Artificial Sequence: Synthetic primer
gtctcttttcttagctttctgtctttctttcaacgtagtg

SEQ ID NO: 34843 - DNA, 40 bp, Artificial Sequence
  Description of Artificial Sequence: Synthetic primer
ctcgggggcgttcatggcgcgcagggcgggaaggctgcgg

SEQ ID NO: 34844 - DNA, 40 bp, Artificial Sequence
  Description of Artificial Sequence: Synthetic primer
cacaactatcgtagctctctatgctttcaaaagagtcctg

SEQ ID NO: 34845 - DNA, 40 bp, Artificial Sequence
  Description of Artificial Sequence: Synthetic primer
tctcaggtgaaaggagcagtagatgatgatgtagcagaag

SEQ ID NO: 34846 - DNA, 40 bp, Artificial Sequence
  Description of Artificial Sequence: Synthetic primer
cccctcctccccactcaaccaggtactgcacagagccatc

SEQ ID NO: 34847 - DNA, 40 bp, Artificial Sequence
  Description of Artificial Sequence: Synthetic primer
gcctacttcctccatggccagcaagagcttttcgtagact

SEQ ID NO: 34848 - DNA, 40 bp, Artificial Sequence
  Description of Artificial Sequence: Synthetic primer
cacgcttaggttcccatcacactgatgactccgggtttgg

SEQ ID NO: 34849 - DNA, 40 bp, Artificial Sequence
  Description of Artificial Sequence: Synthetic primer
ccaaaaagttgcaattttaccccagacattaaatgaaaaa

SEQ ID NO: 34850 - DNA, 40 bp, Artificial Sequence
  Description of Artificial Sequence: Synthetic primer
tgtgaaaagactggtcagcctgcattagtatgacagtagg

SEQ ID NO: 34851 - DNA, 40 bp, Artificial Sequence
  Description of Artificial Sequence: Synthetic primer
agaaagcctttggtcatgccacccactctaccagttgtcc

SEQ ID NO: 34852 - DNA, 40 bp, Artificial Sequence
  Description of Artificial Sequence: Synthetic primer
cattgaatatatgcagctgcctcttcatatgtgtttgatc

SEQ ID NO: 34853 - DNA, 40 bp, Artificial Sequence
  Description of Artificial Sequence: Synthetic primer
tctgccctgctccatgcctcatggtgggtgcaggcaagtg

SEQ ID NO: 34854 - DNA, 40 bp, Artificial Sequence
  Description of Artificial Sequence: Synthetic primer
gattgagccctagagacaggtgaagtgtatgcctcagacg

SEQ ID NO: 34855 - DNA, 40 bp, Artificial Sequence
  Description of Artificial Sequence: Synthetic primer
ttctttaaggtcagggggagacttctggaacctggcatct

SEQ ID NO: 34856 - DNA, 40 bp, Artificial Sequence
  Description of Artificial Sequence: Synthetic primer
gttaggagcctcctgccatccagcagctccacaaagtcaa

SEQ ID NO: 34857 - DNA, 40 bp, Artificial Sequence
  Description of Artificial Sequence: Synthetic primer
acacaatccataattcttgaaatatttctaaaatgcagtc

SEQ ID NO: 34858 - DNA, 40 bp, Artificial Sequence
  Description of Artificial Sequence: Synthetic primer
gctaatgtgcctcttggtctgccaggaaatattacgtttg

SEQ ID NO: 34859 - DNA, 40 bp, Artificial Sequence
  Description of Artificial Sequence: Synthetic primer
attttctgaaaaataaaaatcaaaaagtaaatactgacaa

SEQ ID NO: 34860 - DNA, 40 bp, Artificial Sequence
  Description of Artificial Sequence: Synthetic primer
tgcaggtgtaccacaccttcctcaggattgcagagaccag

SEQ ID NO: 34861 - DNA, 40 bp, Artificial Sequence
  Description of Artificial Sequence: Synthetic primer
cgccccctccgccggcagagccagagccggggctggggcc

SEQ ID NO: 34862 - DNA, 40 bp, Artificial Sequence
  Description of Artificial Sequence: Synthetic primer
gcagtaaatatttactatttataatgaataaacagttatg

SEQ ID NO: 34863 - DNA, 40 bp, Artificial Sequence
  Description of Artificial Sequence: Synthetic primer
gatgtcatctttcccaaccgtgaccttcttgccattctcc

SEQ ID NO: 34864 - DNA, 40 bp, Artificial Sequence
  Description of Artificial Sequence: Synthetic primer
tgagagggtactggaacaagccgaaggcaaagtggaggag

SEQ ID NO: 34865 - DNA, 40 bp, Artificial Sequence
  Description of Artificial Sequence: Synthetic primer
agggctgggggtggggcggggtggggtgagggaggcagga

SEQ ID NO: 34866 - DNA, 40 bp, Artificial Sequence
  Description of Artificial Sequence: Synthetic primer
atacaagatattatgtataaaatgtaacactgatgatagg

SEQ ID NO: 34867 - DNA, 40 bp, Artificial Sequence
  Description of Artificial Sequence: Synthetic primer
aggcgctgggcagcgagctctccgtcatcttggccatctg

SEQ ID NO: 34868 - DNA, 40 bp, Artificial Sequence
  Description of Artificial Sequence: Synthetic primer
ctggacgatagaagtacagcccaatgtagagtacaaatgc

SEQ ID NO: 34869 - DNA, 40 bp, Artificial Sequence
  Description of Artificial Sequence: Synthetic primer
gactttctcgcgaagcagcacacgatgttggacagcaaag

SEQ ID NO: 34870 - DNA, 40 bp, Artificial Sequence
  Description of Artificial Sequence: Synthetic primer
atgcttccaggtgcatcaaggtctactcctttgacttttg

SEQ ID NO: 34871 - DNA, 40 bp, Artificial Sequence
  Description of Artificial Sequence: Synthetic primer
tgtttgttgcctaaatgaaaggcgggtacctcagggcttc

SEQ ID NO: 34872 - DNA, 40 bp, Artificial Sequence
  Description of Artificial Sequence: Synthetic primer
ttgggtagagtcctggcctggtcatttgtgtgtataagtc

SEQ ID NO: 34873 - DNA, 40 bp, Artificial Sequence
  Description of Artificial Sequence: Synthetic primer
aaaaaatgacctgttactgggatcttcaggttcttcaaac

SEQ ID NO: 34874 - DNA, 40 bp, Artificial Sequence
  Description of Artificial Sequence: Synthetic primer
accctaccctctggctcctagcccacaccccctctcttgg

SEQ ID NO: 34875 - DNA, 40 bp, Artificial Sequence
  Description of Artificial Sequence: Synthetic primer
ttaatatcccacctaacagtaaagacatgactccgtatgc

SEQ ID NO: 34876 - DNA, 40 bp, Artificial Sequence
  Description of Artificial Sequence: Synthetic primer
agcattaatgtgcatttgagtgcaagatatcttttacaag

SEQ ID NO: 34877 - DNA, 40 bp, Artificial Sequence
  Description of Artificial Sequence: Synthetic primer
ttcaacaaatgttttattcgcatttgcagaaaggaaggtc

SEQ ID NO: 34878 - DNA, 40 bp, Artificial Sequence
  Description of Artificial Sequence: Synthetic primer
gtcagggttaggtgtgaaagtgggagatgaggggcattgg

SEQ ID NO: 34879 - DNA, 40 bp, Artificial Sequence
  Description of Artificial Sequence: Synthetic primer
tgcagtaagatgaaaatttgtcattacaatagttacagtg

SEQ ID NO: 34880 - DNA, 40 bp, Artificial Sequence
  Description of Artificial Sequence: Synthetic primer
gtgagaggacagttctctactgatgagttggtggctgaag

SEQ ID NO: 34881 - DNA, 40 bp, Artificial Sequence
  Description of Artificial Sequence: Synthetic primer
ccaaggtaagataactaatcaaggccatttaatccgtcac

SEQ ID NO: 34882 - DNA, 40 bp, Artificial Sequence; identical to SEQ ID NO: 20078
  Description of Artificial Sequence: Synthetic primer

SEQ ID NO: 34883 - DNA, 40 bp, Artificial Sequence
  Description of Artificial Sequence: Synthetic primer
tataatctatcaaaggtgttttactcagtgttctaatttt

SEQ ID NO: 34884 - DNA, 40 bp, Artificial Sequence
  Description of Artificial Sequence: Synthetic primer
tgaacttttgatgaggttgaaggacaacagggatctacag

SEQ ID NO: 34885 - DNA, 40 bp, Artificial Sequence
  Description of Artificial Sequence: Synthetic primer
taggtagaggcaaagtctgtccccaccatctttaaactgc

SEQ ID NO: 34886 - DNA, 40 bp, Artificial Sequence
  Description of Artificial Sequence: Synthetic primer
tgtaggcgagtatgtcgaatgcccgtcaagccagatgatg

SEQ ID NO: 34887 - DNA, 40 bp, Artificial Sequence
  Description of Artificial Sequence: Synthetic primer
aggtgggatttcaaattcctcatcacccaagcttggtgta

SEQ ID NO: 34888 - DNA, 40 bp, Artificial Sequence
  Description of Artificial Sequence: Synthetic primer
ggggctctcacctccacaggacaccgacacaggggccttc

SEQ ID NO: 34889 - DNA, 40 bp, Artificial Sequence
  Description of Artificial Sequence: Synthetic primer
catagtagtgggtaagtagctgagggccagacccaatcac

SEQ ID NO: 34890 - DNA, 40 bp, Artificial Sequence
  Description of Artificial Sequence: Synthetic primer
ctgtgttacagtctgatttagacttacagacattgtctcc

SEQ ID NO: 34891 - DNA, 40 bp, Artificial Sequence
  Description of Artificial Sequence: Synthetic primer
ctgctcagcctgcctgcaactcacctcgaaggcggaccag

SEQ ID NO: 34892 - DNA, 40 bp, Artificial Sequence
  Description of Artificial Sequence: Synthetic primer
tacaccccccaatacgttcacctagtgcctccagcgttgg

SEQ ID NO: 34893 - DNA, 40 bp, Artificial Sequence
  Description of Artificial Sequence: Synthetic primer
ttcctcaaaacttgaaaatcggtccgcatcaaagcagtag

SEQ ID NO: 34894 - DNA, 40 bp, Artificial Sequence
  Description of Artificial Sequence: Synthetic primer
gacctgagcagcccgtacctctccaacggacccctgtctc

SEQ ID NO: 34895 - DNA, 40 bp, Artificial Sequence
  Description of Artificial Sequence: Synthetic primer
gtgtcccgctgggccagcctggctgacagctactcagacc

SEQ ID NO: 34896 - DNA, 40 bp, Artificial Sequence
  Description of Artificial Sequence: Synthetic primer
tttgggtttctgagagaccaagtccagatggtaatgaatg

SEQ ID NO: 34897 - DNA, 40 bp, Artificial Sequence
  Description of Artificial Sequence: Synthetic primer
aagtgatcattaataaagcttttcttggttccttcagtgg

SEQ ID NO: 34898 - DNA, 40 bp, Artificial Sequence
  Description of Artificial Sequence: Synthetic primer
ggccaagtacttcctgcggcagatggcacagcccttccac

SEQ ID NO: 34899 - DNA, 40 bp, Artificial Sequence
  Description of Artificial Sequence: Synthetic primer
attgtaaagcatgcactgatcagtttattggtgtttttgc

SEQ ID NO: 34900 - DNA, 40 bp, Artificial Sequence
  Description of Artificial Sequence: Synthetic primer
cgtggcaccccaggaccacggctccccggctgggtacccc

SEQ ID NO: 34901 - DNA, 40 bp, Artificial Sequence
  Description of Artificial Sequence: Synthetic primer
tcaatctcccctttccattcgggattcaagaacctacgtg

SEQ ID NO: 34902 - DNA, 40 bp, Artificial Sequence
  Description of Artificial Sequence: Synthetic primer
cttttgccgtccactagagcagagatgacattacccaaag

SEQ ID NO: 34903 - DNA, 40 bp, Artificial Sequence
  Description of Artificial Sequence: Synthetic primer
tgcagaggcattttgcatttgtctgtgtcaagaagttcac

SEQ ID NO: 34904 - DNA, 40 bp, Artificial Sequence
  Description of Artificial Sequence: Synthetic primer
cgcagacctgctcacagcggccctgcagacactcgtccac

SEQ ID NO: 34905 - DNA, 40 bp, Artificial Sequence
  Description of Artificial Sequence: Synthetic primer
atttggatttcctcacctacattcggcgggtatggtcttg

SEQ ID NO: 34906 - DNA, 40 bp, Artificial Sequence
  Description of Artificial Sequence: Synthetic primer
ttccacactgctgagaaatgttgctttgagtttgctttac

SEQ ID NO: 34907 - DNA, 40 bp, Artificial Sequence
  Description of Artificial Sequence: Synthetic primer
gcaattgcacgagccaagcatatggaaatgtctctaaaag

SEQ ID NO: 34908 - DNA, 40 bp, Artificial Sequence
  Description of Artificial Sequence: Synthetic primer
cagaaaagtgatgatggattttatttcactcacactccag

SEQ ID NO: 34909 - DNA, 40 bp, Artificial Sequence
  Description of Artificial Sequence: Synthetic primer
aaggttgggcgagatgtggtacagaaagctcagacaaaag

SEQ ID NO: 34910 - DNA, 40 bp, Artificial Sequence
  Description of Artificial Sequence: Synthetic primer
tctacttgaattattccgagactccttggaggggtgaaac

SEQ ID NO: 34911 - DNA, 40 bp, Artificial Sequence
  Description of Artificial Sequence: Synthetic primer
ctttttagtgagtgtttctgtgctgtggtcattctcagtc

SEQ ID NO: 34912 - DNA, 40 bp, Artificial Sequence
  Description of Artificial Sequence: Synthetic primer
ggagatacacatgtggccatggtagtcaaaccagtcaaac

SEQ ID NO: 34913 - DNA, 40 bp, Artificial Sequence
  Description of Artificial Sequence: Synthetic primer
gaatatacattttcaccaggcaaatcaaaagccactccag

SEQ ID NO: 34914 - DNA, 40 bp, Artificial Sequence
  Description of Artificial Sequence: Synthetic primer
tgacccccagttccacacctgaatcctcaccgactgattg

SEQ ID NO: 34915 - DNA, 40 bp, Artificial Sequence
  Description of Artificial Sequence: Synthetic primer
agtctgaatacccaactgttcacgcagacctcgcctgtgg

SEQ ID NO: 34916 - DNA, 40 bp, Artificial Sequence
  Description of Artificial Sequence: Synthetic primer
gcagcaccatcatagggcctgtatcgaggctcatagaggc

SEQ ID NO: 34917 - DNA, 40 bp, Artificial Sequence
  Description of Artificial Sequence: Synthetic primer
ggtttttacttaactgtttcaaagccaagacctcacacac

SEQ ID NO: 34918 - DNA, 40 bp, Artificial Sequence
  Description of Artificial Sequence: Synthetic primer
catggttttcaaaccagccagttccgctcggcgcatgcgc

SEQ ID NO: 34919 - DNA, 40 bp, Artificial Sequence
  Description of Artificial Sequence: Synthetic primer
gctggagaaccactctcgccgcctggagatgaccaacaag

SEQ ID NO: 34920 - DNA, 40 bp, Artificial Sequence
  Description of Artificial Sequence: Synthetic primer
cattttcagtaagaaaaaaacaaaatcagtcaattcagag

SEQ ID NO: 34921 - DNA, 40 bp, Artificial Sequence
  Description of Artificial Sequence: Synthetic primer
gtttcttgatttcttctttctcgttctttcctccgtaatg

SEQ ID NO: 34922 - DNA, 40 bp, Artificial Sequence
  Description of Artificial Sequence: Synthetic primer
cctgctcactgcgaaaccctccggtacctcatggcacatc

SEQ ID NO: 34923 - DNA, 40 bp, Artificial Sequence
  Description of Artificial Sequence: Synthetic primer
tgctctccgcagacgtgcatctggtccaggccctgtcatc

SEQ ID NO: 34924 - DNA, 40 bp, Artificial Sequence
  Description of Artificial Sequence: Synthetic primer
acagtagcctccaagaagccgttgtgcgaagacagagtcc

SEQ ID NO: 34925 - DNA, 40 bp, Artificial Sequence
  Description of Artificial Sequence: Synthetic primer
tgaaatgtatttctgtaccacaatttacgcttcaataaaa

SEQ ID NO: 34926 - DNA, 40 bp, Artificial Sequence
  Description of Artificial Sequence: Synthetic primer
actaattgggggtgtgatgatgtgcatcgcctgccggggc

SEQ ID NO: 34927 - DNA, 40 bp, Artificial Sequence
  Description of Artificial Sequence: Synthetic primer
tgcctttcacgacatgaaaggttgtgtcatgaaacctcgc

SEQ ID NO: 34928 - DNA, 40 bp, Artificial Sequence
  Description of Artificial Sequence: Synthetic primer
tgcagtttggaatgaaattcttcaattgtcaaagtggagt

SEQ ID NO: 34929 - DNA, 40 bp, Artificial Sequence
  Description of Artificial Sequence: Synthetic primer
ggttgaaggcagagtttagtaattaagttagaattaagag

SEQ ID NO: 34930 - DNA, 40 bp, Artificial Sequence
  Description of Artificial Sequence: Synthetic primer
cattctctggctttaagtcacggtgtataataccgttttc

SEQ ID NO: 34931 - DNA, 40 bp, Artificial Sequence
  Description of Artificial Sequence: Synthetic primer
tccagcaacctgcagtacttcaagcggctcattcagatcc

SEQ ID NO: 34932 - DNA, 40 bp, Artificial Sequence
  Description of Artificial Sequence: Synthetic primer
gtagccaggcaaagcactatagaagctgatgaaagacttc

SEQ ID NO: 34933 - DNA, 40 bp, Artificial Sequence
  Description of Artificial Sequence: Synthetic primer
gtttgtttgtctgcattaagatatatttcctgaaggtttg

SEQ ID NO: 34934 - DNA, 40 bp, Artificial Sequence
  Description of Artificial Sequence: Synthetic primer
tgtaaacgaatatttgatgcccaaatcatagatccaatcg

SEQ ID NO: 34935 - DNA, 40 bp, Artificial Sequence
  Description of Artificial Sequence: Synthetic primer
tggagtctgttttccgccgtgtgcaggatttgaggataac

SEQ ID NO: 34936 - DNA, 40 bp, Artificial Sequence
  Description of Artificial Sequence: Synthetic primer
caatttctttagcttttgactttgccaaagtgtagatagc

SEQ ID NO: 34937 - DNA, 40 bp, Artificial Sequence
  Description of Artificial Sequence: Synthetic primer
aataatagtccatgctggtgatgccaaggctgtgtttctg

SEQ ID NO: 34938 - DNA, 40 bp, Artificial Sequence
  Description of Artificial Sequence: Synthetic primer
taactggttcacacgaatgtttgcttacttccgacgcaac

SEQ ID NO: 34939 - DNA, 40 bp, Artificial Sequence
  Description of Artificial Sequence: Synthetic primer
agcacagacctgaaccataaaacacaagaaaattatagag

SEQ ID NO: 34940 - DNA, 40 bp, Artificial Sequence
  Description of Artificial Sequence: Synthetic primer
ctccggaggccagcggccgggatagccccggcggagcccg

SEQ ID NO: 34941 - DNA, 40 bp, Artificial Sequence
  Description of Artificial Sequence: Synthetic primer
atgccatattttggggaaaaggaaattgaaatgtaccaag

SEQ ID NO: 34942 - DNA, 40 bp, Artificial Sequence
  Description of Artificial Sequence: Synthetic primer
gctggaattcctggtgctcaattcttagtgaccccaatcc

SEQ ID NO: 34943 - DNA, 40 bp, Artificial Sequence
  Description of Artificial Sequence: Synthetic primer
aagacacaatttgagcacttctcagaattatctagtatgc

SEQ ID NO: 34944 - DNA, 40 bp, Artificial Sequence
  Description of Artificial Sequence: Synthetic primer
ctctagttggctaatctaaagacctggttgccacccagtg

SEQ ID NO: 34945 - DNA, 40 bp, Artificial Sequence
  Description of Artificial Sequence: Synthetic primer
tatccagaactctacctttgggcatagacatggttctcag

SEQ ID NO: 34946 - DNA, 40 bp, Artificial Sequence
  Description of Artificial Sequence: Synthetic primer
agaggaagcaaaaactgctgacacagccattccatttcac

SEQ ID NO: 34947 - DNA, 40 bp, Artificial Sequence
  Description of Artificial Sequence: Synthetic primer
aacattatgattattccttgtctgtactttagtatttttc

SEQ ID NO: 34948 - DNA, 40 bp, Artificial Sequence
  Description of Artificial Sequence: Synthetic primer
cctcacaatattgtccagcataatagtacttgaacagtca

SEQ ID NO: 34949 - DNA, 40 bp, Artificial Sequence
  Description of Artificial Sequence: Synthetic primer
ggaatgtttaggaaaatagttcggaagctgaaagttaccc

SEQ ID NO: 34950 - DNA, 40 bp, Artificial Sequence
  Description of Artificial Sequence: Synthetic primer
catgttccttatatgaaaacgtttaaattactgggtcttt

SEQ ID NO: 34951 - DNA, 40 bp, Artificial Sequence
  Description of Artificial Sequence: Synthetic primer
tactgatttaagctagccaaactgtaagaaacaagccatc

SEQ ID NO: 34952 - DNA, 40 bp, Artificial Sequence
  Description of Artificial Sequence: Synthetic primer
cagtgctggaaagaagcaagagccccctatgcacacattg

SEQ ID NO: 34953 - DNA, 40 bp, Artificial Sequence
  Description of Artificial Sequence: Synthetic primer
tctcaggtcagagccacctaccacggaagtttcagtacaa

SEQ ID NO: 34954 - DNA, 40 bp, Artificial Sequence
  Description of Artificial Sequence: Synthetic primer
atgaaaatgcatctcagaccagaataccataacaaaactt

SEQ ID NO: 34955 - DNA, 40 bp, Artificial Sequence
  Description of Artificial Sequence: Synthetic primer
gccagtcgggccggtctgtgtacagcatctcgctgagttc

SEQ ID NO: 34956 - DNA, 40 bp, Artificial Sequence
  Description of Artificial Sequence: Synthetic primer
gacgcttgtggaatgtgtcgttcacattgtaagtgatgtc

SEQ ID NO: 34957 - DNA, 40 bp, Artificial Sequence
  Description of Artificial Sequence: Synthetic primer
tcacctctctaccacaaagcctagaaaatcaaatggtctc

SEQ ID NO: 34958 - DNA, 40 bp, Artificial Sequence
  Description of Artificial Sequence: Synthetic primer
gaaccaaaatgccacatacactaggggcagtcagaaactg

SEQ ID NO: 34959 - DNA, 40 bp, Artificial Sequence
  Description of Artificial Sequence: Synthetic primer
gtaatgttgcaaatatgttcaaaacctctgcggttctgtg

SEQ ID NO: 34960 - DNA, 40 bp, Artificial Sequence
  Description of Artificial Sequence: Synthetic primer
aatttttaatctcagcatgtatcctttgaagtcgagaatc

SEQ ID NO: 34961 - DNA, 40 bp, Artificial Sequence
  Description of Artificial Sequence: Synthetic primer
tgactggtggttgtcatggagatctgagcccggcagaaag

SEQ ID NO: 34962 - DNA, 40 bp, Artificial Sequence
  Description of Artificial Sequence: Synthetic primer
taatcacaatgacaactaggacatttcacttggacagtgc

SEQ ID NO: 34963 - DNA, 40 bp, Artificial Sequence
  Description of Artificial Sequence: Synthetic primer
aaaaaagatgacaaatgtcaatgtcatttataactggtag

SEQ ID NO: 34964 - DNA, 40 bp, Artificial Sequence
  Description of Artificial Sequence: Synthetic primer
ttccagaagcaggctgcggggactcggcaccagcaatgag

SEQ ID NO: 34965 - DNA, 40 bp, Artificial Sequence
  Description of Artificial Sequence: Synthetic primer
ctcctctgaggtagcagcccccagagaaggttagctgttc

SEQ ID NO: 34966 - DNA, 40 bp, Artificial Sequence
  Description of Artificial Sequence: Synthetic primer
caagacctttaatcatgctaagagctaattccagcttgtg

SEQ ID NO: 34967 - DNA, 40 bp, Artificial Sequence
  Description of Artificial Sequence: Synthetic primer
gagcccaggcatgttcccatgagggtggcccccatgagac

SEQ ID NO: 34968 - DNA, 40 bp, Artificial Sequence
  Description of Artificial Sequence: Synthetic primer
atggcaacgaaagcacctgctcaatggtatccatttgtaa

SEQ ID NO: 34969 - DNA, 40 bp, Artificial Sequence
  Description of Artificial Sequence: Synthetic primer
gttcacttgtggtaatggcagttaactgtatttccaaatc

SEQ ID NO: 34970 - DNA, 40 bp, Artificial Sequence
  Description of Artificial Sequence: Synthetic primer
tttaaaacatttagtagatgaagcacattgccttcggttg

SEQ ID NO: 34971 - DNA, 40 bp, Artificial Sequence
  Description of Artificial Sequence: Synthetic primer
cggcctgccgttgataaaaacaccgccgagctggttgacg

SEQ ID NO: 34972 - DNA, 40 bp, Artificial Sequence
  Description of Artificial Sequence: Synthetic primer
tcctggagaccttccgacactcttccttcgtccccttcac

SEQ ID NO: 34973 - DNA, 40 bp, Artificial Sequence
  Description of Artificial Sequence: Synthetic primer
caccatcaccaccatcttggacaccctgggggagaatgac

SEQ ID NO: 34974 - DNA, 40 bp, Artificial Sequence
  Description of Artificial Sequence: Synthetic primer
ccgccaggcgggcgtcgggctagtgggcaggcgtggcttc

SEQ ID NO: 34975 - DNA, 40 bp, Artificial Sequence
  Description of Artificial Sequence: Synthetic primer
cgctcatcgcagatgctggtcatgaacgaggcaggtttgc

SEQ ID NO: 34976 - DNA, 40 bp, Artificial Sequence
  Description of Artificial Sequence: Synthetic primer
caactgctatccaaagaagaaccgagaacaatggagaaag

SEQ ID NO: 34977 - DNA, 40 bp, Artificial Sequence
  Description of Artificial Sequence: Synthetic primer
agaaaatactatttgaaatggacattatcgcattatcttg

SEQ ID NO: 34978 - DNA, 40 bp, Artificial Sequence
  Description of Artificial Sequence: Synthetic primer
caaagccacaaaggccagtgacttagcacaccttcaagac

SEQ ID NO: 34979 - DNA, 40 bp, Artificial Sequence
  Description of Artificial Sequence: Synthetic primer
caacagcgccgccaagcgcatcaaggtggagaaggacctg

SEQ ID NO: 34980 - DNA, 40 bp, Artificial Sequence
  Description of Artificial Sequence: Synthetic primer
gaacttcctcttgaaatgggacaggaacttggggttctcc

SEQ ID NO: 34981 - DNA, 40 bp, Artificial Sequence
  Description of Artificial Sequence: Synthetic primer
ccatactagttttaaaaattcactgaaattacaaagatac

SEQ ID NO: 34982 - DNA, 40 bp, Artificial Sequence
  Description of Artificial Sequence: Synthetic primer
caagcaataaagccaaaccccctacagatggctttcttgg

SEQ ID NO: 34983 - DNA, 40 bp, Artificial Sequence
  Description of Artificial Sequence: Synthetic primer
aagaaggatcgtaacaacacggaagtggagaggttttcag

SEQ ID NO: 34984 - DNA, 40 bp, Artificial Sequence
  Description of Artificial Sequence: Synthetic primer
aaactgtaaagcattacagtttcaaaagagtgtctgtgag

SEQ ID NO: 34985 - DNA, 40 bp, Artificial Sequence
  Description of Artificial Sequence: Synthetic primer
gtcagttgtttctgaccctttctgtcggagtggtctctgg

SEQ ID NO: 34986 - DNA, 40 bp, Artificial Sequence
  Description of Artificial Sequence: Synthetic primer
cttcttttacgtctgatttctggcaggaggtcctgaaaac

SEQ ID NO: 34987 - DNA, 40 bp, Artificial Sequence
  Description of Artificial Sequence: Synthetic primer
gctgggctgcagggctgcaggcaggtcggctcttgggtgg

SEQ ID NO: 34988 - DNA, 40 bp, Artificial Sequence
  Description of Artificial Sequence: Synthetic primer
aagaaacgagttccgctactccgggacgagactccaaaac

SEQ ID NO: 34989 - DNA, 40 bp, Artificial Sequence
  Description of Artificial Sequence: Synthetic primer
tcaggcccagcgactgcagcgtcgtgccccgcagggcagc

SEQ ID NO: 34990 - DNA, 40 bp, Artificial Sequence
  Description of Artificial Sequence: Synthetic primer
ggcaggccattcccatgcagagtctttttcagaacatttg

SEQ ID NO: 34991 - DNA, 40 bp, Artificial Sequence
  Description of Artificial Sequence: Synthetic primer
acctgctttaattaaagcagtttcctttcttataaagtgg

SEQ ID NO: 34992 - DNA, 40 bp, Artificial Sequence
  Description of Artificial Sequence: Synthetic primer
catatcaagttaatggagtcaacccagcctatccagaatc

SEQ ID NO: 34993 - DNA, 40 bp, Artificial Sequence
  Description of Artificial Sequence: Synthetic primer
aatagctgtttaacaaatcaaagttagctttttgcttctc

SEQ ID NO: 34994 - DNA, 40 bp, Artificial Sequence
  Description of Artificial Sequence: Synthetic primer
ccagcaaaggtggattcttcaggtgtcatagacctttttg

SEQ ID NO: 34995 - DNA, 40 bp, Artificial Sequence
  Description of Artificial Sequence: Synthetic primer
catttctctagggctctgtttttattttgttttgttcttc

SEQ ID NO: 34996 - DNA, 40 bp, Artificial Sequence
  Description of Artificial Sequence: Synthetic primer
agtgtggaagaagggactgtgctgtcaaaccatgtcaatc

SEQ ID NO: 34997 - DNA, 40 bp, Artificial Sequence
  Description of Artificial Sequence: Synthetic primer
aacacaagagaaaaacattaaatagtcttattacaagaaa

SEQ ID NO: 34998 - DNA, 40 bp, Artificial Sequence
  Description of Artificial Sequence: Synthetic primer
acgatgaaaagcagcagggcaagaatcacagcacagaagg

SEQ ID NO: 34999 - DNA, 40 bp, Artificial Sequence
  Description of Artificial Sequence: Synthetic primer
ttttttaaatgactttttagtttagaaagttctgatgagc

SEQ ID NO: 35000 - DNA, 40 bp, Artificial Sequence
  Description of Artificial Sequence: Synthetic primer
ggagcacaaaagttgacttgaggggaagaaaggcagtttt

SEQ ID NO: 35001 - DNA, 40 bp, Artificial Sequence
  Description of Artificial Sequence: Synthetic primer
cgcaggagcggctctccagcggcactggctcaggcttctc

SEQ ID NO: 35002 - DNA, 40 bp, Artificial Sequence
  Description of Artificial Sequence: Synthetic primer
tacacaaaacaatgttttttgagttgtaaataaataaaaa

SEQ ID NO: 35003 - DNA, 40 bp, Artificial Sequence
  Description of Artificial Sequence: Synthetic primer
tcaataagaacgctggcgagacccttctgcagcgggcagc

SEQ ID NO: 35004 - DNA, 40 bp, Artificial Sequence
  Description of Artificial Sequence: Synthetic primer
gccaaagagaatgagaagaaagccaagagcttggaagcag

SEQ ID NO: 35005 - DNA, 40 bp, Artificial Sequence
  Description of Artificial Sequence: Synthetic primer
agctcagcctcatcttgcagccagagatagagatttcctc

SEQ ID NO: 35006 - DNA, 40 bp, Artificial Sequence
  Description of Artificial Sequence: Synthetic primer
aaaggaacttatgtaatgtaaaattacattataatttttc

SEQ ID NO: 35007 - DNA, 40 bp, Artificial Sequence
  Description of Artificial Sequence: Synthetic primer
accacatcctggatgccctgtagcccctgcccgcatcctc

SEQ ID NO: 35008 - DNA, 40 bp, Artificial Sequence
  Description of Artificial Sequence: Synthetic primer
gaatgataaatgtcatggtggtctataactccaaataaac

SEQ ID NO: 35009 - DNA, 40 bp, Artificial Sequence
  Description of Artificial Sequence: Synthetic primer
cgaggacatctaccggagccggctcccccactacttcccc

SEQ ID NO: 35010 - DNA, 40 bp, Artificial Sequence
  Description of Artificial Sequence: Synthetic primer
ggaaaagccatcacttgattgcattcttctgtagagttta

SEQ ID NO: 35011 - DNA, 40 bp, Artificial Sequence
  Description of Artificial Sequence: Synthetic primer
acctgcttcctgggccgctccatcggcgtgcgccacgcgg

SEQ ID NO: 35012 - DNA, 40 bp, Artificial Sequence
  Description of Artificial Sequence: Synthetic primer
attcccagattggcaaggaataaaaataaactatcttcac

SEQ ID NO: 35013 - DNA, 40 bp, Artificial Sequence
  Description of Artificial Sequence: Synthetic primer
tattgacgacgttgccgggtacaagtgcaactgcctgctg

SEQ ID NO: 35014 - DNA, 40 bp, Artificial Sequence
  Description of Artificial Sequence: Synthetic primer
ttcaagttgtgcttctttcattttttcttttttgtttgcc

SEQ ID NO: 35015 - DNA, 40 bp, Artificial Sequence
  Description of Artificial Sequence: Synthetic primer
ccccagccacagggacctcagggacagaaacagacctatg

SEQ ID NO: 35016 - DNA, 40 bp, Artificial Sequence
  Description of Artificial Sequence: Synthetic primer
cagaggaagacagggtggtggcaggactggagtggcagtg

SEQ ID NO: 35017 - DNA, 40 bp, Artificial Sequence
  Description of Artificial Sequence: Synthetic primer
tggaaaagcgggccctgggaattcatgctgaaacaacaag

SEQ ID NO: 35018 - DNA, 40 bp, Artificial Sequence
  Description of Artificial Sequence: Synthetic primer
cgggaccagtgttggcatgggctgcggccaaattcccttc

SEQ ID NO: 35019 - DNA, 40 bp, Artificial Sequence
  Description of Artificial Sequence: Synthetic primer
agaaaatgtgccacccaagaacctggccaaagctatgaag

SEQ ID NO: 35020 - DNA, 40 bp, Artificial Sequence
  Description of Artificial Sequence: Synthetic primer
acagcgataacaaatgtctggaagagacgaggaaacaaac

SEQ ID NO: 35021 - DNA, 40 bp, Artificial Sequence
  Description of Artificial Sequence: Synthetic primer
agataaacaaaaccaggtgacatttccaagcctctcaagg

SEQ ID NO: 35022 - DNA, 40 bp, Artificial Sequence
  Description of Artificial Sequence: Synthetic primer
caaattccttctgggggtacacgtcgatgccgttggacag

SEQ ID NO: 35023 - DNA, 40 bp, Artificial Sequence
  Description of Artificial Sequence: Synthetic primer
tatcacgttttttcttctgtcgtaccttttccaaaaattc

SEQ ID NO: 35024 - DNA, 40 bp, Artificial Sequence
  Description of Artificial Sequence: Synthetic primer
aggacagcccaagctagagatgaacaatacagaaacttcc

SEQ ID NO: 35025 - DNA, 40 bp, Artificial Sequence
  Description of Artificial Sequence: Synthetic primer
tgaactatatgataatgttcttgattctcttccagaactc

SEQ ID NO: 35026 - DNA, 40 bp, Artificial Sequence
  Description of Artificial Sequence: Synthetic primer
aaatctatgggaacgagtcatcttctctgtcctctatctc

SEQ ID NO: 35027 - DNA, 40 bp, Artificial Sequence
  Description of Artificial Sequence: Synthetic primer
acgccctcagcttcgccagccaccaaaaccctggacagac

SEQ ID NO: 35028 - DNA, 40 bp, Artificial Sequence
  Description of Artificial Sequence: Synthetic primer
tgagactgtggtccctgggaaccggctggtcagctgtgag

SEQ ID NO: 35029 - DNA, 40 bp, Artificial Sequence
  Description of Artificial Sequence: Synthetic primer
gtgatccattttaaaatttgtaattcaataaagttttttt

SEQ ID NO: 35030 - DNA, 40 bp, Artificial Sequence
  Description of Artificial Sequence: Synthetic primer
ctctgaaaacagagttggaggacacgctggattccacagc

SEQ ID NO: 35031 - DNA, 40 bp, Artificial Sequence
  Description of Artificial Sequence: Synthetic primer
caaagaataccggcctgaaactggttcttgggtgtttaag

SEQ ID NO: 35032 - DNA, 40 bp, Artificial Sequence
  Description of Artificial Sequence: Synthetic primer
tcgcgtttccccaaggcctccaaatagtctaaaaactcac

SEQ ID NO: 35033 - DNA, 40 bp, Artificial Sequence
  Description of Artificial Sequence: Synthetic primer
aaatgtgagccagctgcggagcagtgcgtcagagtttcag

SEQ ID NO: 35034 - DNA, 40 bp, Artificial Sequence
  Description of Artificial Sequence: Synthetic primer
aactccctgccccaaaccactgaaaagaaaagtaaccttc

SEQ ID NO: 35035 - DNA, 40 bp, Artificial Sequence
  Description of Artificial Sequence: Synthetic primer
tttgcttccataaacaagtgcaattttttaaagtgctgtc

SEQ ID NO: 35036 - DNA, 40 bp, Artificial Sequence
  Description of Artificial Sequence: Synthetic primer
gtgctgcttgaggctactggggactgtggcactggacgtg

SEQ ID NO: 35037 - DNA, 40 bp, Artificial Sequence
  Description of Artificial Sequence: Synthetic primer
aaacgattgtgaggcgggaacggctttctgctgccttttt

SEQ ID NO: 35038 - DNA, 40 bp, Artificial Sequence
  Description of Artificial Sequence: Synthetic primer
tggtagagggggtgggtgagagttggaggtcatcactgct

SEQ ID NO: 35039 - DNA, 40 bp, Artificial Sequence
  Description of Artificial Sequence: Synthetic primer
ctttaattttagtataatgatggtcttggattgtctgacc

SEQ ID NO: 35040 - DNA, 40 bp, Artificial Sequence
  Description of Artificial Sequence: Synthetic primer
gtatgataaatcattaaaaatgcgagtgtaaatatttttt

SEQ ID NO: 35041 - DNA, 40 bp, Artificial Sequence
  Description of Artificial Sequence: Synthetic primer
atgtgtggtcttttgggatcctgctgacggaaattgtcac

SEQ ID NO: 35042 - DNA, 40 bp, Artificial Sequence
  Description of Artificial Sequence: Synthetic primer
ctggtctgcactgcttctggcggacacaggtctcccttac

SEQ ID NO: 35043 - DNA, 40 bp, Artificial Sequence
  Description of Artificial Sequence: Synthetic primer
ccttgtccctgtgggtagttaggatactgaggacctggac

SEQ ID NO: 35044 - DNA, 40 bp, Artificial Sequence
  Description of Artificial Sequence: Synthetic primer
accacagcccttctctggcaacagctgatccttcatcttg

SEQ ID NO: 35045 - DNA, 40 bp, Artificial Sequence
  Description of Artificial Sequence: Synthetic primer
atgaggtgaacatagatacagctctttccccttccccccc

SEQ ID NO: 35046 - DNA, 40 bp, Artificial Sequence
  Description of Artificial Sequence: Synthetic primer
ggtgacggcacacagcatgtactgtggcggctggagaatg

SEQ ID NO: 35047 - DNA, 40 bp, Artificial Sequence
  Description of Artificial Sequence: Synthetic primer
agtagtgtttagattgaagattgagtgaaatattttcttg

SEQ ID NO: 35048 - DNA, 40 bp, Artificial Sequence
  Description of Artificial Sequence: Synthetic primer
cgcggagaatgggcaggaggtggggaactcccgaatcaag

SEQ ID NO: 35049 - DNA, 40 bp, Artificial Sequence
  Description of Artificial Sequence: Synthetic primer
acaatgacattgcgctgatgaagctgcagaagcctctgac

SEQ ID NO: 35050 - DNA, 40 bp, Artificial Sequence
  Description of Artificial Sequence: Synthetic primer
gcagggcacgggaccggcctgtgagcgcaagctcaacatc

SEQ ID NO: 35051 - DNA, 40 bp, Artificial Sequence
  Description of Artificial Sequence: Synthetic primer
tgccaattgcaagcaaagtatccagcagttgagctaggac

SEQ ID NO: 35052 - DNA, 40 bp, Artificial Sequence
  Description of Artificial Sequence: Synthetic primer
gttgactggaacagagtaaacaaaccgccataccccaaac

SEQ ID NO: 35053 - DNA, 40 bp, Artificial Sequence
  Description of Artificial Sequence: Synthetic primer
gtaaggaaaactcacccaattatgggctcttactgctttg

SEQ ID NO: 35054 - DNA, 40 bp, Artificial Sequence
  Description of Artificial Sequence: Synthetic primer
aaatccagaaagtctgcccgcacagggacaggcccagaac

SEQ ID NO: 35055 - DNA, 40 bp, Artificial Sequence
  Description of Artificial Sequence: Synthetic primer
caaaaacataaagaacggatagatcacataaaacttctgc

SEQ ID NO: 35056 - DNA, 40 bp, Artificial Sequence
  Description of Artificial Sequence: Synthetic primer
ttacaataaaaagcagaggggaggatctgttttcctttcc

SEQ ID NO: 35057 - DNA, 40 bp, Artificial Sequence
  Description of Artificial Sequence: Synthetic primer
ggatatgcaatgctgtgtcttcatcccatggcttggatcg

SEQ ID NO: 35058 - DNA, 40 bp, Artificial Sequence
  Description of Artificial Sequence: Synthetic primer
agaacttcacaatcaagaaatgcagaaacgtaaagaaatg

SEQ ID NO: 35059 - DNA, 40 bp, Artificial Sequence
  Description of Artificial Sequence: Synthetic primer
gagatcactccgtcccacgaactgatccaggcagtggggc

SEQ ID NO: 35060 - DNA, 40 bp, Artificial Sequence
  Description of Artificial Sequence: Synthetic primer
cttgcagggggtgctggcacactcgtccacatcgtactgg

SEQ ID NO: 35061 - DNA, 40 bp, Artificial Sequence
  Description of Artificial Sequence: Synthetic primer
gggataccagtgaggactgctccagcagctgctgtctctc

SEQ ID NO: 35062 - DNA, 40 bp, Artificial Sequence
  Description of Artificial Sequence: Synthetic primer
ttctgaccatagtggacaggaagatgaagaatggctttcc

SEQ ID NO: 35063 - DNA, 40 bp, Artificial Sequence
  Description of Artificial Sequence: Synthetic primer
ggcggcctgcccagctgccgcccccggactctgatctctg

SEQ ID NO: 35064 - DNA, 40 bp, Artificial Sequence
  Description of Artificial Sequence: Synthetic primer
taagatcagctactggttacatctacaaactgtaaagtgc

SEQ ID NO: 35065 - DNA, 40 bp, Artificial Sequence
  Description of Artificial Sequence: Synthetic primer
ttgtatatcgttgaaatcctggaaaggaggacgtcagtgc

SEQ ID NO: 35066 - DNA, 40 bp, Artificial Sequence
  Description of Artificial Sequence: Synthetic primer
ccctttgcaaggccaaaatctcaggcaggaactttaccag

SEQ ID NO: 35067 - DNA, 40 bp, Artificial Sequence
  Description of Artificial Sequence: Synthetic primer
ggacccaggcgccgccggcgggcgtgaggcgccggagccc

SEQ ID NO: 35068 - DNA, 40 bp, Artificial Sequence
  Description of Artificial Sequence: Synthetic primer
gctcttgttcaatggaagcctcctgcccttgccataggag

SEQ ID NO: 35069 - DNA, 40 bp, Artificial Sequence
  Description of Artificial Sequence: Synthetic primer
gtccaaggcttccgctactgtgactgggctgttttcttgg

SEQ ID NO: 35070 - DNA, 40 bp, Artificial Sequence
  Description of Artificial Sequence: Synthetic primer
ggggaacctgtgcatggcctggtgcacacggaggtggtag

SEQ ID NO: 35071 - DNA, 40 bp, Artificial Sequence
  Description of Artificial Sequence: Synthetic primer
agaggcaacggatctcctggcgtactggaatgacacttac

SEQ ID NO: 35072 - DNA, 40 bp, Artificial Sequence
  Description of Artificial Sequence: Synthetic primer
ccgccctctgcagactgggcttagcgtgagcaggcacttc

SEQ ID NO: 35073 - DNA, 40 bp, Artificial Sequence
  Description of Artificial Sequence: Synthetic primer
tgggaccccctattttagcttttctgtggctggtgaatgg

SEQ ID NO: 35074 - DNA, 40 bp, Artificial Sequence
  Description of Artificial Sequence: Synthetic primer
accagtctcccacctcgccagtctccaatcaaggcttctc

SEQ ID NO: 35075 - DNA, 40 bp, Artificial Sequence
  Description of Artificial Sequence: Synthetic primer
gaacactattcagtggcttgaaaatgagctcaacagatgg

SEQ ID NO: 35076 - DNA, 40 bp, Artificial Sequence
  Description of Artificial Sequence: Synthetic primer
acagtaactgccattgctgtcactgcctcctcgagatggc

SEQ ID NO: 35077 - DNA, 40 bp, Artificial Sequence
  Description of Artificial Sequence: Synthetic primer
tctcttttcatattaaaaatggtctttctgtgaactagca

SEQ ID NO: 35078 - DNA, 40 bp, Artificial Sequence
  Description of Artificial Sequence: Synthetic primer
tccatgcggcgatcctttagagctgcgggatcaggtgttg

SEQ ID NO: 35079 - DNA, 40 bp, Artificial Sequence
  Description of Artificial Sequence: Synthetic primer
atgttggctttctgagtccactgccaaggaacagatccag

SEQ ID NO: 35080 - DNA, 40 bp, Artificial Sequence
  Description of Artificial Sequence: Synthetic primer
cgagctagcttgccagtccaagtccccaagggtagtcagc

SEQ ID NO: 35081 - DNA, 40 bp, Artificial Sequence
  Description of Artificial Sequence: Synthetic primer
aaacagatttaagcattgcccgacttcttctaaagtgatg

SEQ ID NO: 35082 - DNA, 40 bp, Artificial Sequence
  Description of Artificial Sequence: Synthetic primer
taccttcacctccacccatactttcttctgtttctgtacc

SEQ ID NO: 35083 - DNA, 40 bp, Artificial Sequence
  Description of Artificial Sequence: Synthetic primer
tgtgctgacctactgtccagtgcactcacggaacctgtgc

SEQ ID NO: 35084 - DNA, 40 bp, Artificial Sequence
  Description of Artificial Sequence: Synthetic primer
ccagtgtgtagaactgctcctccagctccttggcgatgtc

SEQ ID NO: 35085 - DNA, 40 bp, Artificial Sequence
  Description of Artificial Sequence: Synthetic primer
tacaagtaaccacatttggaaattatttgagaacttcttg

SEQ ID NO: 35086 - DNA, 40 bp, Artificial Sequence
  Description of Artificial Sequence: Synthetic primer
ttaacaattgaatcttgctagattaataacgcatctttcc

SEQ ID NO: 35087 - DNA, 40 bp, Artificial Sequence
  Description of Artificial Sequence: Synthetic primer
taatgttcacacagaatttaaatgggatttaatgtcttag

SEQ ID NO: 35088 - DNA, 40 bp, Artificial Sequence
  Description of Artificial Sequence: Synthetic primer
acatctcatcaagtagtcaaggagtgatagaaaaggaatc

SEQ ID NO: 35089 - DNA, 40 bp, Artificial Sequence
  Description of Artificial Sequence: Synthetic primer
ggccccttcagatggaggagtccaggctgtgacagccagg

SEQ ID NO: 35090 - DNA, 40 bp, Artificial Sequence
  Description of Artificial Sequence: Synthetic primer
aatgaggattagtaacagggggaaggggacgggggaaatc

SEQ ID NO: 35091 - DNA, 40 bp, Artificial Sequence
  Description of Artificial Sequence: Synthetic primer
gccccggcgccgggcagcgcctcctccgaggcaccgccgc

SEQ ID NO: 35092 - DNA, 40 bp, Artificial Sequence
  Description of Artificial Sequence: Synthetic primer
caggcatcgcccaccctgtccccgctgtcacccatcactc

SEQ ID NO: 35093 - DNA, 40 bp, Artificial Sequence
  Description of Artificial Sequence: Synthetic primer
atttttcctgtgctacataccaccacagcagcccagcttc

SEQ ID NO: 35094 - DNA, 40 bp, Artificial Sequence
  Description of Artificial Sequence: Synthetic primer
tataaacaaggagcttttataactctggttgcacgaaatg

SEQ ID NO: 35095 - DNA, 40 bp, Artificial Sequence
  Description of Artificial Sequence: Synthetic primer
gcgttagatttctttagtttgtcaaaatctatcaggtcag

SEQ ID NO: 35096 - DNA, 40 bp, Artificial Sequence
  Description of Artificial Sequence: Synthetic primer
ggtcttcccgcattttcccctctttcttcattcctcacag

SEQ ID NO: 35097 - DNA, 40 bp, Artificial Sequence
  Description of Artificial Sequence: Synthetic primer
ggacttactttcttggagttgtcccaggttggaatgagac

SEQ ID NO: 35098 - DNA, 40 bp, Artificial Sequence; identical to SEQ ID NO: 10872
  Description of Artificial Sequence: Synthetic primer

SEQ ID NO: 35099 - DNA, 40 bp, Artificial Sequence
  Description of Artificial Sequence: Synthetic primer
ttcattgcctggacgggccggggaatggagttcaagctca

SEQ ID NO: 35100 - DNA, 40 bp, Artificial Sequence
  Description of Artificial Sequence: Synthetic primer
ttagaaagcgccttattatcatcaccaaacacagatgttg

SEQ ID NO: 35101 - DNA, 40 bp, Artificial Sequence
  Description of Artificial Sequence: Synthetic primer
gaagttcgagcaggtcactggagccggaaagtgcgtcctg

SEQ ID NO: 35102 - DNA, 40 bp, Artificial Sequence
  Description of Artificial Sequence: Synthetic primer
tcctggaggccttctgcaagaatgtgccctactcccagtg

SEQ ID NO: 35103 - DNA, 40 bp, Artificial Sequence
  Description of Artificial Sequence: Synthetic primer
gcagctgtgttcttgagacttgctgggggcctggggaagg

SEQ ID NO: 35104 - DNA, 40 bp, Artificial Sequence
  Description of Artificial Sequence: Synthetic primer
tactgagaacagtccctcccttgtgcgggtcgcacggcta

SEQ ID NO: 35105 - DNA, 40 bp, Artificial Sequence
  Description of Artificial Sequence: Synthetic primer
tctgtgcccgggaggcctgctggccccgcctcggctttcg

SEQ ID NO: 35106 - DNA, 40 bp, Artificial Sequence
  Description of Artificial Sequence: Synthetic primer
cagaattttctccgtctccttttctgccccgtgtatcttc

SEQ ID NO: 35107 - DNA, 40 bp, Artificial Sequence
  Description of Artificial Sequence: Synthetic primer
aaaacctgcactgtgttcggcaaccagtacaagttgtcag

SEQ ID NO: 35108 - DNA, 40 bp, Artificial Sequence
  Description of Artificial Sequence: Synthetic primer
gagtgttagcactgccgagggtacagaggagaacctgtcc

SEQ ID NO: 35109 - DNA, 40 bp, Artificial Sequence
  Description of Artificial Sequence: Synthetic primer
gaatagtagcgttagcagcaccctacagagggtaagtttc

SEQ ID NO: 35110 - DNA, 40 bp, Artificial Sequence
  Description of Artificial Sequence: Synthetic primer
cccctatcccctcccaaaatattacgtatagatggtgcat

SEQ ID NO: 35111 - DNA, 40 bp, Artificial Sequence
  Description of Artificial Sequence: Synthetic primer
gtagccaaggacatcgtccagacgcataatgttgtcaatg

SEQ ID NO: 35112 - DNA, 40 bp, Artificial Sequence
  Description of Artificial Sequence: Synthetic primer
gacaggcccctgaggcttaacttgctggacttggattatg

SEQ ID NO: 35113 - DNA, 40 bp, Artificial Sequence
  Description of Artificial Sequence: Synthetic primer
tcaaactttgcaaatgctgcggagctagagaataaaagtc

SEQ ID NO: 35114 - DNA, 40 bp, Artificial Sequence
  Description of Artificial Sequence: Synthetic primer
ggaggggaccaaaatcactgaggtcccagaatatcataga

SEQ ID NO: 35115 - DNA, 40 bp, Artificial Sequence
  Description of Artificial Sequence: Synthetic primer
ttatggatataagagaaaaatgcctttttataaaatttca

SEQ ID NO: 35116 - DNA, 40 bp, Artificial Sequence
  Description of Artificial Sequence: Synthetic primer
gagtttcctcagaacccacagtgagaggggagggctcctg

SEQ ID NO: 35117 - DNA, 40 bp, Artificial Sequence
  Description of Artificial Sequence: Synthetic primer
ctgatgagaaaaagatcaaccgcatcaggcaggtcaccac

SEQ ID NO: 35118 - DNA, 40 bp, Artificial Sequence
  Description of Artificial Sequence: Synthetic primer
taactaattaactgatttcataagttttcgttttgccaag

SEQ ID NO: 35119 - DNA, 40 bp, Artificial Sequence
  Description of Artificial Sequence: Synthetic primer
ctgctgcagctttttccttctttgttcaggtgggaggttg

SEQ ID NO: 35120 - DNA, 40 bp, Artificial Sequence
  Description of Artificial Sequence: Synthetic primer
gcttggcgggatctgggatcacttctggttcttctgttgc

SEQ ID NO: 35121 - DNA, 40 bp, Artificial Sequence
  Description of Artificial Sequence: Synthetic primer
acgagaaagtagaagaattctgtatcagaaccttaatgag

SEQ ID NO: 35122 - DNA, 40 bp, Artificial Sequence
  Description of Artificial Sequence: Synthetic primer
caaatgagccgggcgagattttagtaattcaatgctctgg

SEQ ID NO: 35123 - DNA, 40 bp, Artificial Sequence
  Description of Artificial Sequence: Synthetic primer
agggaagcattataaatgcattaatccttatagtcaattc

SEQ ID NO: 35124 - DNA, 40 bp, Artificial Sequence
  Description of Artificial Sequence: Synthetic primer
agcaatagcctttatagaatcattcacagctcctgacacc

SEQ ID NO: 35125 - DNA, 40 bp, Artificial Sequence
  Description of Artificial Sequence: Synthetic primer
ggtatttctttaagtcttcttcacttcgagtggcttcagg

SEQ ID NO: 35126 - DNA, 40 bp, Artificial Sequence
  Description of Artificial Sequence: Synthetic primer
atcaggcagcagtggacaacagccgcaaggccagcagcac

SEQ ID NO: 35127 - DNA, 40 bp, Artificial Sequence
  Description of Artificial Sequence: Synthetic primer
cagcagcaccggcaacctcgcggccaacctgacgcacctg

SEQ ID NO: 35128 - DNA, 40 bp, Artificial Sequence
  Description of Artificial Sequence: Synthetic primer
ttcataatatctctgagacagaaaggctgatcgagacagg

SEQ ID NO: 35129 - DNA, 40 bp, Artificial Sequence
  Description of Artificial Sequence: Synthetic primer
gaagtcagacctggagaggcagctgaagactctgaccaag

SEQ ID NO: 35130 - DNA, 40 bp, Artificial Sequence
  Description of Artificial Sequence: Synthetic primer
agccaaggcaaactgatcctttgaaagcttcccacagtcc

SEQ ID NO: 35131 - DNA, 40 bp, Artificial Sequence
  Description of Artificial Sequence: Synthetic primer
actttccctcttggcccattcgatcatatcttcttcagag

SEQ ID NO: 35132 - DNA, 40 bp, Artificial Sequence
  Description of Artificial Sequence: Synthetic primer
gcttcgctgtctctcaaccaaagtccatcaaagaagaagg

SEQ ID NO: 35133 - DNA, 40 bp, Artificial Sequence
  Description of Artificial Sequence: Synthetic primer
gagagcccccctggtgtcggctctgcgagcgccgggcggg

SEQ ID NO: 35134 - DNA, 40 bp, Artificial Sequence
  Description of Artificial Sequence: Synthetic primer
ctgcttaatgttaatctctccaagcttcccaccagactgc

SEQ ID NO: 35135 - DNA, 40 bp, Artificial Sequence
  Description of Artificial Sequence: Synthetic primer
aagatgtggaaggtccgttcttccttggcttggcggatag

SEQ ID NO: 35136 - DNA, 40 bp, Artificial Sequence
  Description of Artificial Sequence: Synthetic primer
acaacatgcagaatgttttcctgaacttatccggaaattc

SEQ ID NO: 35137 - DNA, 40 bp, Artificial Sequence
  Description of Artificial Sequence: Synthetic primer
aaatgttttctgaatgctttatattctttctgctgtaaat

SEQ ID NO: 35138 - DNA, 40 bp, Artificial Sequence
  Description of Artificial Sequence: Synthetic primer
cacaggataacttgcatcagacgcaatttaatgaaagctc

SEQ ID NO: 35139 - DNA, 40 bp, Artificial Sequence
  Description of Artificial Sequence: Synthetic primer
acaggtcgtcaccgggcagggcgcccgacggctccgggta

SEQ ID NO: 35140 - DNA, 40 bp, Artificial Sequence
  Description of Artificial Sequence: Synthetic primer
tggcttctccaggggcccagctcttgtccctgctcttcag

SEQ ID NO: 35141 - DNA, 40 bp, Artificial Sequence
  Description of Artificial Sequence: Synthetic primer
tagggtgaggtcaacctaatactgacttgtcagtatctcc

SEQ ID NO: 35142 - DNA, 40 bp, Artificial Sequence
  Description of Artificial Sequence: Synthetic primer
gcagcccggcgcagccacagcagcgtctgttgagcggaac

SEQ ID NO: 35143 - DNA, 40 bp, Artificial Sequence
  Description of Artificial Sequence: Synthetic primer
aataaaacaaatcccagcagtaatacatttcttaaacctc

SEQ ID NO: 35144 - DNA, 40 bp, Artificial Sequence
  Description of Artificial Sequence: Synthetic primer
cagactttggcctcatcttcactgagtggaattccaacag

SEQ ID NO: 35145 - DNA, 40 bp, Artificial Sequence
  Description of Artificial Sequence: Synthetic primer
atacaggtatgataggtgtctatatgggtttgaaatgctc

SEQ ID NO: 35146 - DNA, 40 bp, Artificial Sequence
  Description of Artificial Sequence: Synthetic primer
ttagattctattggctgccgaatgccaaaggcttgagttc

SEQ ID NO: 35147 - DNA, 40 bp, Artificial Sequence
  Description of Artificial Sequence: Synthetic primer
tctgaattttcccaagaattatgtgacttttcagctggtg

SEQ ID NO: 35148 - DNA, 40 bp, Artificial Sequence
  Description of Artificial Sequence: Synthetic primer
agtagaggccctctagtcactcactgctgctgtttctgat

SEQ ID NO: 35149 - DNA, 40 bp, Artificial Sequence
  Description of Artificial Sequence: Synthetic primer
tacccaccccaggcctgacacccagccacaccctgttctg

SEQ ID NO: 35150 - DNA, 40 bp, Artificial Sequence
  Description of Artificial Sequence: Synthetic primer
ttcagagaagacgagtcaagggcaaagctagcagggtgag

SEQ ID NO: 35151 - DNA, 40 bp, Artificial Sequence
  Description of Artificial Sequence: Synthetic primer
gagctttacttgccgtgtaaaaggaggaaaggggtggaaa

SEQ ID NO: 35152 - DNA, 40 bp, Artificial Sequence
  Description of Artificial Sequence: Synthetic primer
aatactcaggggaaggcaggcaaaggctagtcatctaaac

SEQ ID NO: 35153 - DNA, 40 bp, Artificial Sequence
  Description of Artificial Sequence: Synthetic primer
agtcgtcaacaagatggtgagcatgatggagggtgtcatc

SEQ ID NO: 35154 - DNA, 40 bp, Artificial Sequence
  Description of Artificial Sequence: Synthetic primer
cctgctgcttctccccctctgtccaggcccgcaggccttc

SEQ ID NO: 35155 - DNA, 40 bp, Artificial Sequence
  Description of Artificial Sequence: Synthetic primer
ctccaggtcctccaggtactccatctctccctgggacacc

SEQ ID NO: 35156 - DNA, 40 bp, Artificial Sequence
  Description of Artificial Sequence: Synthetic primer
tggagtttagaaagcttcccataaaatgcctgcttgatgc

SEQ ID NO: 35157 - DNA, 40 bp, Artificial Sequence
  Description of Artificial Sequence: Synthetic primer
agaagacctatatcacagatcctgtttcagccccctgtgc

SEQ ID NO: 35158 - DNA, 40 bp, Artificial Sequence
  Description of Artificial Sequence: Synthetic primer
aaggaaggcctctccagctgggcagtctctcaggccacac

SEQ ID NO: 35159 - DNA, 40 bp, Artificial Sequence; identical to SEQ ID NO: 6707
  Description of Artificial Sequence: Synthetic primer

SEQ ID NO: 35160 - DNA, 40 bp, Artificial Sequence
  Description of Artificial Sequence: Synthetic primer
gtggaaggagaacaggtgttgatgccaataaccagcattg

SEQ ID NO: 35161 - DNA, 40 bp, Artificial Sequence
  Description of Artificial Sequence: Synthetic primer
tggtcggcaatggtggtgctgtgccacccggggtagctgc

SEQ ID NO: 35162 - DNA, 40 bp, Artificial Sequence
  Description of Artificial Sequence: Synthetic primer
gctaagagaagagaaggagagactagaacaggatctacag

SEQ ID NO: 35163 - DNA, 40 bp, Artificial Sequence
  Description of Artificial Sequence: Synthetic primer
aagctttgagcaccagttaaatctcattccttcccttttt

SEQ ID NO: 35164 - DNA, 40 bp, Artificial Sequence
  Description of Artificial Sequence: Synthetic primer
tacaggtcctggacctccttgggataccgccgttccatta

SEQ ID NO: 35165 - DNA, 40 bp, Artificial Sequence
  Description of Artificial Sequence: Synthetic primer
tgactctcttgtctccgggcaggccttgatagaaagaacc

SEQ ID NO: 35166 - DNA, 40 bp, Artificial Sequence
  Description of Artificial Sequence: Synthetic primer
tagcacctccagtgtcccctcggtatttgggcaggaacac

SEQ ID NO: 35167 - DNA, 40 bp, Artificial Sequence
  Description of Artificial Sequence: Synthetic primer
attatatatagaaaagaggagaggaaaactattccatgtt

SEQ ID NO: 35168 - DNA, 40 bp, Artificial Sequence
  Description of Artificial Sequence: Synthetic primer
cctccttctttcaccccttaccccaaagagaaagagtttg

SEQ ID NO: 35169 - DNA, 40 bp, Artificial Sequence
  Description of Artificial Sequence: Synthetic primer
tgatggtagctgtagacttgctcccaggcacagtgaactc

SEQ ID NO: 35170 - DNA, 40 bp, Artificial Sequence
  Description of Artificial Sequence: Synthetic primer
cctcaccagtgtttcacagaggacacagcccaccccttgc

SEQ ID NO: 35171 - DNA, 40 bp, Artificial Sequence
  Description of Artificial Sequence: Synthetic primer
cgcgagcagcggcggctgccggagggacgatgagctgcgc

SEQ ID NO: 35172 - DNA, 40 bp, Artificial Sequence
  Description of Artificial Sequence: Synthetic primer
tttgcaaacatgccttttgttttctatataccctgacctt

SEQ ID NO: 35173 - DNA, 40 bp, Artificial Sequence
  Description of Artificial Sequence: Synthetic primer
aggcttctgccgtctctggaaaacccccaaatggcttcag

SEQ ID NO: 35174 - DNA, 40 bp, Artificial Sequence
  Description of Artificial Sequence: Synthetic primer
tcgaaaaactctgaagttgacaagaaacgaaccaaatctc

SEQ ID NO: 35175 - DNA, 40 bp, Artificial Sequence
  Description of Artificial Sequence: Synthetic primer
ttctgaggtttgcctcagatagactgatggctccaaattc

SEQ ID NO: 35176 - DNA, 40 bp, Artificial Sequence
  Description of Artificial Sequence: Synthetic primer
tacacacaagtacatacagggatattcacatatagggtag

SEQ ID NO: 35177 - DNA, 40 bp, Artificial Sequence
  Description of Artificial Sequence: Synthetic primer
tgctgtcctgttggtcagggatacgggctcactgaatctg

SEQ ID NO: 35178 - DNA, 40 bp, Artificial Sequence
  Description of Artificial Sequence: Synthetic primer
gccctcttctttccagaacggggaacaggctgagtgaaac

SEQ ID NO: 35179 - DNA, 40 bp, Artificial Sequence
  Description of Artificial Sequence: Synthetic primer
acgatttttcatgtcctcataccgctgctgacactgtttg

SEQ ID NO: 35180 - DNA, 40 bp, Artificial Sequence
  Description of Artificial Sequence: Synthetic primer
atctcaggtgcacagcttccccctgcagccccaccacagg

SEQ ID NO: 35181 - DNA, 40 bp, Artificial Sequence
  Description of Artificial Sequence: Synthetic primer
tggcatttttgaaggactcttcacattgcacaccagatgc

SEQ ID NO: 35182 - DNA, 40 bp, Artificial Sequence
  Description of Artificial Sequence: Synthetic primer
agaagctgctggtcctgtgtcacaccaccttagcctcttg

SEQ ID NO: 35183 - DNA, 40 bp, Artificial Sequence
  Description of Artificial Sequence: Synthetic primer
cttaggagtcctactagtgaaggtagttttgagtctttcc

SEQ ID NO: 35184 - DNA, 40 bp, Artificial Sequence
  Description of Artificial Sequence: Synthetic primer
cttgttgttgtggctctggactgaccgcaggtaaggcttc

SEQ ID NO: 35185 - DNA, 40 bp, Artificial Sequence
  Description of Artificial Sequence: Synthetic primer
caaagcattaacagactgtggagagcttgccttaaaacag

SEQ ID NO: 35186 - DNA, 40 bp, Artificial Sequence
  Description of Artificial Sequence: Synthetic primer
gcaagtctgcaggtgcaccacttcccgcctccatgactcg

SEQ ID NO: 35187 - DNA, 40 bp, Artificial Sequence
  Description of Artificial Sequence: Synthetic primer
gtgttaactgatggacactcgaaggatggccttgctctgc

SEQ ID NO: 35188 - DNA, 40 bp, Artificial Sequence
  Description of Artificial Sequence: Synthetic primer
ataatatcacttcaaaaacagctaattaatgtcaaaaagg

SEQ ID NO: 35189 - DNA, 40 bp, Artificial Sequence
  Description of Artificial Sequence: Synthetic primer
aatattaaaatgtgcatcatcttgtcggccatgcagtcct

SEQ ID NO: 35190 - DNA, 40 bp, Artificial Sequence
  Description of Artificial Sequence: Synthetic primer
agcgtaccagatgaggaaggacggcagtccccagccatgc

SEQ ID NO: 35191 - DNA, 40 bp, Artificial Sequence
  Description of Artificial Sequence: Synthetic primer
cagcatcaggggcagcacagcagcagggttcttcgcatcg

SEQ ID NO: 35192 - DNA, 40 bp, Artificial Sequence
  Description of Artificial Sequence: Synthetic primer
ctcctcctgggtttccgtgtgacagatgccccgtcctgtg

SEQ ID NO: 35193 - DNA, 40 bp, Artificial Sequence
  Description of Artificial Sequence: Synthetic primer
tgattttagctaagtacttgacatgtgcaccctcatgttt

SEQ ID NO: 35194 - DNA, 40 bp, Artificial Sequence
  Description of Artificial Sequence: Synthetic primer
aagacggcgccgggtccggcagggcctggcgggagggggc

SEQ ID NO: 35195 - DNA, 40 bp, Artificial Sequence
  Description of Artificial Sequence: Synthetic primer
gtaccatattggcaaccataatattgtcataggtgctctc

SEQ ID NO: 35196 - DNA, 40 bp, Artificial Sequence
  Description of Artificial Sequence: Synthetic primer
ttaaaccctcctcagtggaggaagaagatagcttttttcg

SEQ ID NO: 35197 - DNA, 40 bp, Artificial Sequence
  Description of Artificial Sequence: Synthetic primer
aattgcgaacaaatacatgactttctccccaaaggccact

SEQ ID NO: 35198 - DNA, 40 bp, Artificial Sequence
  Description of Artificial Sequence: Synthetic primer
gaaaaagtccattatccactttggtttgctggtccttgac

SEQ ID NO: 35199 - DNA, 40 bp, Artificial Sequence
  Description of Artificial Sequence: Synthetic primer
acatgactcagaactttcgttcacagcaggcacggtcttc

SEQ ID NO: 35200 - DNA, 40 bp, Artificial Sequence
  Description of Artificial Sequence: Synthetic primer
aattgttgtctttttcttcttcagcctcttaccattctgc

SEQ ID NO: 35201 - DNA, 40 bp, Artificial Sequence; identical to SEQ ID NO: 22544
  Description of Artificial Sequence: Synthetic primer

SEQ ID NO: 35202 - DNA, 40 bp, Artificial Sequence
  Description of Artificial Sequence: Synthetic primer
gtagtggtaataagtcaccacataagtgattatggacttc

SEQ ID NO: 35203 - DNA, 40 bp, Artificial Sequence
  Description of Artificial Sequence: Synthetic primer
ttaaaataaaataattgggaaagaaggtgggtcatgtatt

SEQ ID NO: 35204 - DNA, 40 bp, Artificial Sequence
  Description of Artificial Sequence: Synthetic primer
cagttgtaaatgagtcggtcacttggttctctatagtgtt

SEQ ID NO: 35205 - DNA, 40 bp, Artificial Sequence
  Description of Artificial Sequence: Synthetic primer
tctgtcgggccatctccagctgggagattcgagctgtcag

SEQ ID NO: 35206 - DNA, 40 bp, Artificial Sequence
  Description of Artificial Sequence: Synthetic primer
tggctccccgggggcccttggtgagcgccgacccctgctc

SEQ ID NO: 35207 - DNA, 40 bp, Artificial Sequence
  Description of Artificial Sequence: Synthetic primer
cgtcagcagtttctgctccaggctgggcagctcccggaag

SEQ ID NO: 35208 - DNA, 40 bp, Artificial Sequence
  Description of Artificial Sequence: Synthetic primer
cagctttgctctgggtcatcaggctcaagtgcctgctctg

SEQ ID NO: 35209 - DNA, 40 bp, Artificial Sequence
  Description of Artificial Sequence: Synthetic primer
cacaaattagcagaagtcagccaaaatatagagaaactgc

SEQ ID NO: 35210 - DNA, 40 bp, Artificial Sequence
  Description of Artificial Sequence: Synthetic primer
atcatttaatcaacttcaatggtctactgaaacaaaaatg

SEQ ID NO: 35211 - DNA, 40 bp, Artificial Sequence
  Description of Artificial Sequence: Synthetic primer
gagaaattgccccctaaaaagtccaaggcttactttgtcc

SEQ ID NO: 35212 - DNA, 40 bp, Artificial Sequence
  Description of Artificial Sequence: Synthetic primer
cgagcagctgtgtttttagcactagaggagcaagaaaaag

SEQ ID NO: 35213 - DNA, 40 bp, Artificial Sequence
  Description of Artificial Sequence: Synthetic primer
acagcacagccccccgggcccagccgcctccctctcttgg

SEQ ID NO: 35214 - DNA, 40 bp, Artificial Sequence
  Description of Artificial Sequence: Synthetic primer
tgaaggaagagtgagaggctgaccttaatacccctaaaag

SEQ ID NO: 35215 - DNA, 40 bp, Artificial Sequence
  Description of Artificial Sequence: Synthetic primer
gctgagtaccgacgcctggaggactgagcagccccgcctc

SEQ ID NO: 35216 - DNA, 40 bp, Artificial Sequence
  Description of Artificial Sequence: Synthetic primer
taatcactgttggggaaattagttccatgtttttgtccag

SEQ ID NO: 35217 - DNA, 40 bp, Artificial Sequence
  Description of Artificial Sequence: Synthetic primer
atctttaattctgctttgcaatgtgttctttgttcgataa

SEQ ID NO: 35218 - DNA, 40 bp, Artificial Sequence
  Description of Artificial Sequence: Synthetic primer
tgcaccttctccacaggcttctccagcgggggtccaatgc

SEQ ID NO: 35219 - DNA, 40 bp, Artificial Sequence
  Description of Artificial Sequence: Synthetic primer
tcttcttccattccccatttgggcttcattctctaagacc

SEQ ID NO: 35220 - DNA, 40 bp, Artificial Sequence
  Description of Artificial Sequence: Synthetic primer
cactacttgcatgtaaatctgcaacatgctttggaaagtg

SEQ ID NO: 35221 - DNA, 40 bp, Artificial Sequence
  Description of Artificial Sequence: Synthetic primer
ccttcctcttgcaatccaattcctactctccctcaaggtc

SEQ ID NO: 35222 - DNA, 40 bp, Artificial Sequence
  Description of Artificial Sequence: Synthetic primer
gaaggcactatctaaacacccatctgtaggggacaataag

SEQ ID NO: 35223 - DNA, 40 bp, Artificial Sequence
  Description of Artificial Sequence: Synthetic primer
cagggggaatcagaaggcccttctttataatgagctattc

SEQ ID NO: 35224 - DNA, 40 bp, Artificial Sequence
  Description of Artificial Sequence: Synthetic primer
ctgccaggttccacttcaacttccccagcaccaccagttc

SEQ ID NO: 35225 - DNA, 40 bp, Artificial Sequence
  Description of Artificial Sequence: Synthetic primer
tgcatctcctgaatctccatcttctcctcatccttcatgg

SEQ ID NO: 35226 - DNA, 40 bp, Artificial Sequence
  Description of Artificial Sequence: Synthetic primer
agcagcagcacattgagaactgaacattctaagaagctgg

SEQ ID NO: 35227 - DNA, 40 bp, Artificial Sequence
  Description of Artificial Sequence: Synthetic primer
gactccgcaaagagcagatgaaggtggagtccctggaaag

SEQ ID NO: 35228 - DNA, 40 bp, Artificial Sequence
  Description of Artificial Sequence: Synthetic primer
cacgtgcaaatttttcaaaggccaatccaacaccagatgc

SEQ ID NO: 35229 - DNA, 40 bp, Artificial Sequence
  Description of Artificial Sequence: Synthetic primer
tggaaatccgccagttctcttcctgctctccgcgcttcag

SEQ ID NO: 35230 - DNA, 40 bp, Artificial Sequence
  Description of Artificial Sequence: Synthetic primer
gatttgggtcctttcctctgtgtgctgattgccactgttg

SEQ ID NO: 35231 - DNA, 40 bp, Artificial Sequence
  Description of Artificial Sequence: Synthetic primer
cttatgttagtgctaactccagctttgaccatagtatctg

SEQ ID NO: 35232 - DNA, 40 bp, Artificial Sequence
  Description of Artificial Sequence: Synthetic primer
ttagtgatttctgaggagattaactcattctctgatatag

SEQ ID NO: 35233 - DNA, 40 bp, Artificial Sequence
  Description of Artificial Sequence: Synthetic primer
tcaagttgatggcatgaacattggtccagttcagattggt

SEQ ID NO: 35234 - DNA, 40 bp, Artificial Sequence
  Description of Artificial Sequence: Synthetic primer
actaaggtggacgaagtggtggctcaaagcctggtcttcc

SEQ ID NO: 35235 - DNA, 40 bp, Artificial Sequence
  Description of Artificial Sequence: Synthetic primer
aagaagagagtagcagtaacggcacagcctctcagtcaac

SEQ ID NO: 35236 - DNA, 40 bp, Artificial Sequence
  Description of Artificial Sequence: Synthetic primer
cagaatatgattctgagcatgaaaattccgagcctgttac

SEQ ID NO: 35237 - DNA, 40 bp, Artificial Sequence
  Description of Artificial Sequence: Synthetic primer
gagagagggctgcagggcccacggacattgctgactcttc

SEQ ID NO: 35238 - DNA, 40 bp, Artificial Sequence
  Description of Artificial Sequence: Synthetic primer
aactagaatattgatattttcaggaaagaaatcagctcag

SEQ ID NO: 35239 - DNA, 40 bp, Artificial Sequence
  Description of Artificial Sequence: Synthetic primer
tgcctgcattctcctgcttattgaccggaggtggtttttc

SEQ ID NO: 35240 - DNA, 40 bp, Artificial Sequence
  Description of Artificial Sequence: Synthetic primer
gccattgtttccaagattgcctacataaaccttacagtcc

SEQ ID NO: 35241 - DNA, 40 bp, Artificial Sequence
  Description of Artificial Sequence: Synthetic primer
gactcggggccgctccaaaacacgaccttgggtaatgcac

SEQ ID NO: 35242 - DNA, 40 bp, Artificial Sequence
  Description of Artificial Sequence: Synthetic primer
gaggcagagatccactgtttacagaagaggcttcaagctg

SEQ ID NO: 35243 - DNA, 40 bp, Artificial Sequence
  Description of Artificial Sequence: Synthetic primer
gcagccgcagagcggggaggaggcggtggccctgctggag

SEQ ID NO: 35244 - DNA, 40 bp, Artificial Sequence
  Description of Artificial Sequence: Synthetic primer
gatctgctgttatgcttcgaggctccagcagctggttgag

SEQ ID NO: 35245 - DNA, 40 bp, Artificial Sequence
  Description of Artificial Sequence: Synthetic primer
agaaaaatataagcatgttaaataccatatttacatattg

SEQ ID NO: 35246 - DNA, 40 bp, Artificial Sequence
  Description of Artificial Sequence: Synthetic primer
tttcagtcatctgaaggaggttccgctggttttcctcaag

SEQ ID NO: 35247 - DNA, 40 bp, Artificial Sequence
  Description of Artificial Sequence: Synthetic primer
atctcttttgtgctactgactcattgtcaaacgtctctgc

SEQ ID NO: 35248 - DNA, 40 bp, Artificial Sequence
  Description of Artificial Sequence: Synthetic primer
ctttgaagctgacacaattactctgcgccagaccatcacc

SEQ ID NO: 35249 - DNA, 40 bp, Artificial Sequence
  Description of Artificial Sequence: Synthetic primer
ggcttgaataaagatgtccgccttatccagtgcctgagtg

SEQ ID NO: 35250 - DNA, 40 bp, Artificial Sequence
  Description of Artificial Sequence: Synthetic primer
gaaaggtggattgtaaatttgattagaaatgcaagactgg

SEQ ID NO: 35251 - DNA, 40 bp, Artificial Sequence
  Description of Artificial Sequence: Synthetic primer
tgcggaggctccatcatcacccccgagtggatcgtgacag

SEQ ID NO: 35252 - DNA, 40 bp, Artificial Sequence
  Description of Artificial Sequence: Synthetic primer
gtaaaatacatcattcagtggaaatatgcacaacttctgg

SEQ ID NO: 35253 - DNA, 40 bp, Artificial Sequence
  Description of Artificial Sequence: Synthetic primer
aggtaggagacaaacgatacttctcttcaaacgtctcctg

SEQ ID NO: 35254 - DNA, 40 bp, Artificial Sequence
  Description of Artificial Sequence: Synthetic primer
acgcggtggtgacagcccccatggaagcctactggacagc

SEQ ID NO: 35255 - DNA, 40 bp, Artificial Sequence
  Description of Artificial Sequence: Synthetic primer
agtttttaaaacagtgccaaaacaaaccacatcttttcta

SEQ ID NO: 35256 - DNA, 40 bp, Artificial Sequence
  Description of Artificial Sequence: Synthetic primer
gaccactttctgaacataatttgttgaatgatggtattta

SEQ ID NO: 35257 - DNA, 40 bp, Artificial Sequence
  Description of Artificial Sequence: Synthetic primer
gaagatgggtttttactgaagatcaagctggggcactatg

SEQ ID NO: 35258 - DNA, 40 bp, Artificial Sequence
  Description of Artificial Sequence: Synthetic primer
ggggcgcgcgagctcgcgctcttcctgacccccgagcctg

SEQ ID NO: 35259 - DNA, 40 bp, Artificial Sequence
  Description of Artificial Sequence: Synthetic primer
caccatgcggcattacgatgggctgtggcggccacggctc

SEQ ID NO: 35260 - DNA, 40 bp, Artificial Sequence
  Description of Artificial Sequence: Synthetic primer
ctctgtggtggtgttagatgaggtggggctggcggaagac

SEQ ID NO: 35261 - DNA, 40 bp, Artificial Sequence
  Description of Artificial Sequence: Synthetic primer
gtggatttagcctttttcctggttggctgaggctcctttg

SEQ ID NO: 35262 - DNA, 40 bp, Artificial Sequence
  Description of Artificial Sequence: Synthetic primer
tgggacttctgtggcaagtcatcaagattgggttgtttgc

SEQ ID NO: 35263 - DNA, 40 bp, Artificial Sequence
  Description of Artificial Sequence: Synthetic primer
atccagcagaatctcatcaccattcaagcagactgagacc

SEQ ID NO: 35264 - DNA, 40 bp, Artificial Sequence
  Description of Artificial Sequence: Synthetic primer
gctccagcttggggaatgcagagaagtcaggggagctctg

SEQ ID NO: 35265 - DNA, 40 bp, Artificial Sequence
  Description of Artificial Sequence: Synthetic primer
tcgacttcgagttcctcttcgagtttaaccagcgcgacga

SEQ ID NO: 35266 - DNA, 40 bp, Artificial Sequence
  Description of Artificial Sequence: Synthetic primer
agaccgagtgtcacagacgccagagagcctggatttcctc

SEQ ID NO: 35267 - DNA, 40 bp, Artificial Sequence
  Description of Artificial Sequence: Synthetic primer
agaacatacttgtggaacacttgaaaatttgagaggatgg

SEQ ID NO: 35268 - DNA, 40 bp, Artificial Sequence
  Description of Artificial Sequence: Synthetic primer
aacaatgacaaaagctacttactgtaaacctcacatgcag

SEQ ID NO: 35269 - DNA, 40 bp, Artificial Sequence
  Description of Artificial Sequence: Synthetic primer
cctcagtttctttactaagtatggcctcaaccagtgtatc

SEQ ID NO: 35270 - DNA, 40 bp, Artificial Sequence
  Description of Artificial Sequence: Synthetic primer
agaaagtggaaggggacatgtacgagtctgccaacagcag

SEQ ID NO: 35271 - DNA, 40 bp, Artificial Sequence
  Description of Artificial Sequence: Synthetic primer
tcggagtaggactgttgtttttgttttctgcttttgattc

SEQ ID NO: 35272 - DNA, 40 bp, Artificial Sequence
  Description of Artificial Sequence: Synthetic primer
gaatttcagttacttgattgtataggacagtagtagaacc

SEQ ID NO: 35273 - DNA, 40 bp, Artificial Sequence
  Description of Artificial Sequence: Synthetic primer
ctttctccttaggagagcgaatgccgcgaggcgatggtag

SEQ ID NO: 35274 - DNA, 40 bp, Artificial Sequence
  Description of Artificial Sequence: Synthetic primer
gtattgctgtcaaaggaggcggccatgaatgggtcatttc

SEQ ID NO: 35275 - DNA, 40 bp, Artificial Sequence
  Description of Artificial Sequence: Synthetic primer
ttcagtggggacccccctctgagcctcaggcgccgtatgg

SEQ ID NO: 35276 - DNA, 40 bp, Artificial Sequence
  Description of Artificial Sequence: Synthetic primer
ttacctggagaccctctgagctctcacctgctacttctgc

SEQ ID NO: 35277 - DNA, 40 bp, Artificial Sequence
  Description of Artificial Sequence: Synthetic primer
gacagaactgttcctgccgttgccgccactgctgccattg

SEQ ID NO: 35278 - DNA, 40 bp, Artificial Sequence
  Description of Artificial Sequence: Synthetic primer
cctgcttagcccccgcgtgcggcgcttctcgcaggtcacg

SEQ ID NO: 35279 - DNA, 40 bp, Artificial Sequence
  Description of Artificial Sequence: Synthetic primer
tagtggtggaagtgaatgatacaaattgaagaaaagatcc

SEQ ID NO: 35280 - DNA, 40 bp, Artificial Sequence
  Description of Artificial Sequence: Synthetic primer
atttaaaaaatgagcaaagccttatccgaatcggatatag

SEQ ID NO: 35281 - DNA, 40 bp, Artificial Sequence
  Description of Artificial Sequence: Synthetic primer
tctgacaattttctgtgattttatccactgatcatttaca

SEQ ID NO: 35282 - DNA, 40 bp, Artificial Sequence
  Description of Artificial Sequence: Synthetic primer
ctgctccgcgagccgtagcggggcgcccaggaaggagcag

SEQ ID NO: 35283 - DNA, 40 bp, Artificial Sequence
  Description of Artificial Sequence: Synthetic primer
acctgttatccggcctgagtgtggccatcatgcagcttcc

SEQ ID NO: 35284 - DNA, 40 bp, Artificial Sequence
  Description of Artificial Sequence: Synthetic primer
aaaacaaatgatgaaggtctgcagaaactgaaacccagac

SEQ ID NO: 35285 - DNA, 40 bp, Artificial Sequence
  Description of Artificial Sequence: Synthetic primer
tactaagggtatagttaaactgatccttcagattttcttc

SEQ ID NO: 35286 - DNA, 40 bp, Artificial Sequence
  Description of Artificial Sequence: Synthetic primer
ggagaatgggaagagagggagggagagggaaaccatcaag

SEQ ID NO: 35287 - DNA, 40 bp, Artificial Sequence
  Description of Artificial Sequence: Synthetic primer
gcagaagtgaatgcctgtcacggagggattgatcttcagg

SEQ ID NO: 35288 - DNA, 40 bp, Artificial Sequence
  Description of Artificial Sequence: Synthetic primer
gcgggggacgccaggcgtgggctggcggcgggaccaggag

SEQ ID NO: 35289 - DNA, 40 bp, Artificial Sequence
  Description of Artificial Sequence: Synthetic primer
gattggtggtggggtcatcgagttgaacatggcgtctcag

SEQ ID NO: 35290 - DNA, 40 bp, Artificial Sequence
  Description of Artificial Sequence: Synthetic primer
ccagtggaaaccgcagcttgtctgcagtggacttctttgc

SEQ ID NO: 35291 - DNA, 40 bp, Artificial Sequence
  Description of Artificial Sequence: Synthetic primer
gttctgattccagggtggcctcatggtgactttggacctg

SEQ ID NO: 35292 - DNA, 40 bp, Artificial Sequence
  Description of Artificial Sequence: Synthetic primer
atcacagtttctcagagatactatttgtgaagagagcttg

SEQ ID NO: 35293 - DNA, 40 bp, Artificial Sequence
  Description of Artificial Sequence: Synthetic primer
agagtacagcatcggtgtgctggacatttacggcttcgag

SEQ ID NO: 35294 - DNA, 40 bp, Artificial Sequence
  Description of Artificial Sequence: Synthetic primer
ttatctatcctggatttggtagaaaactaatttgaaagag

SEQ ID NO: 35295 - DNA, 40 bp, Artificial Sequence
  Description of Artificial Sequence: Synthetic primer
ctttaggcttatagtctctaaagtgaaaatttggcaggat

SEQ ID NO: 35296 - DNA, 40 bp, Artificial Sequence
  Description of Artificial Sequence: Synthetic primer
ttgctgatcatggaaagacccttaataattaggcctgcag

SEQ ID NO: 35297 - DNA, 40 bp, Artificial Sequence
  Description of Artificial Sequence: Synthetic primer
tgattgtgtgctgctgtgtctcagcatcagccggcttttc

SEQ ID NO: 35298 - DNA, 40 bp, Artificial Sequence
  Description of Artificial Sequence: Synthetic primer
gttgaagaactcaccgtcagaagaagttgaggctaacagc

SEQ ID NO: 35299 - DNA, 40 bp, Artificial Sequence
  Description of Artificial Sequence: Synthetic primer
cagccctcagaatgcacgttatgaggaaggcagaatgtgg

SEQ ID NO: 35300 - DNA, 40 bp, Artificial Sequence
  Description of Artificial Sequence: Synthetic primer
taaacaggattattattagtgttttatgcatgtaatggac

SEQ ID NO: 35301 - DNA, 40 bp, Artificial Sequence
  Description of Artificial Sequence: Synthetic primer
ctagtacttgtcttataggtaaccaacactgaaaactttg

SEQ ID NO: 35302 - DNA, 40 bp, Artificial Sequence
  Description of Artificial Sequence: Synthetic primer
ctcacccgagcagaagctgagatcgaactcctgcagaatc

SEQ ID NO: 35303 - DNA, 40 bp, Artificial Sequence
  Description of Artificial Sequence: Synthetic primer
tgaaccccttccagcccagccccaagtccccgttcctgag

SEQ ID NO: 35304 - DNA, 40 bp, Artificial Sequence
  Description of Artificial Sequence: Synthetic primer
ggtgcctggtcttcacaggtgcctgctctccacaggtgac

SEQ ID NO: 35305 - DNA, 40 bp, Artificial Sequence
  Description of Artificial Sequence: Synthetic primer
tcagctccttaaattctccatcgatcacagctgttccttc

SEQ ID NO: 35306 - DNA, 40 bp, Artificial Sequence
  Description of Artificial Sequence: Synthetic primer
cttcttttctcagtgattctgaagcatctaatttatccac

SEQ ID NO: 35307 - DNA, 40 bp, Artificial Sequence
  Description of Artificial Sequence: Synthetic primer
gcttctggtgaccttccaagagcctgagagtgaggtggaa

SEQ ID NO: 35308 - DNA, 40 bp, Artificial Sequence
  Description of Artificial Sequence: Synthetic primer
gaaacctttcggcattgctaacttcaacattaagattttc

SEQ ID NO: 35309 - DNA, 40 bp, Artificial Sequence
  Description of Artificial Sequence: Synthetic primer
cggaggactgactgtcccaccctgctgtctacagcccttg

SEQ ID NO: 35310 - DNA, 40 bp, Artificial Sequence
  Description of Artificial Sequence: Synthetic primer
cctgcatgctggacatgtatggtataattattttttcctt

SEQ ID NO: 35311 - DNA, 40 bp, Artificial Sequence
  Description of Artificial Sequence: Synthetic primer
gcgggcacagcttgcgggccaggcacccgaacttgcgaca

SEQ ID NO: 35312 - DNA, 40 bp, Artificial Sequence
  Description of Artificial Sequence: Synthetic primer
agccctgcccttctcgaggcaggaggggagccagggacgg

SEQ ID NO: 35313 - DNA, 40 bp, Artificial Sequence
  Description of Artificial Sequence: Synthetic primer
gttctatcttcttctccagctcatggataatctctttgtg

SEQ ID NO: 35314 - DNA, 40 bp, Artificial Sequence
  Description of Artificial Sequence: Synthetic primer
gtcctactgcaggattttgtgctgtggccactcatgagtg

SEQ ID NO: 35315 - DNA, 40 bp, Artificial Sequence
  Description of Artificial Sequence: Synthetic primer
tttaaaccttccataaaaaaacaattttcggtttctcggg

SEQ ID NO: 35316 - DNA, 40 bp, Artificial Sequence
  Description of Artificial Sequence: Synthetic primer
atagggccgccatcgccgggcgacgacgaggaggaggcgg

SEQ ID NO: 35317 - DNA, 40 bp, Artificial Sequence
  Description of Artificial Sequence: Synthetic primer
ttattctaaaagaaaaggtctgaatggataaattgctatg

SEQ ID NO: 35318 - DNA, 40 bp, Artificial Sequence
  Description of Artificial Sequence: Synthetic primer
ctttcgctcacacaaagccgggaaaattttattagtcctt

SEQ ID NO: 35319 - DNA, 40 bp, Artificial Sequence
  Description of Artificial Sequence: Synthetic primer
cccggtccttctccttcttgtgttctttgtgccggtgttc

SEQ ID NO: 35320 - DNA, 40 bp, Artificial Sequence
  Description of Artificial Sequence: Synthetic primer
aatcccaggcttctcccctctctctgtggtctcaggaaat

SEQ ID NO: 35321 - DNA, 40 bp, Artificial Sequence
  Description of Artificial Sequence: Synthetic primer
agctccatctgcatggcttgcagctcctggtgcttccggc

SEQ ID NO: 35322 - DNA, 40 bp, Artificial Sequence
  Description of Artificial Sequence: Synthetic primer
catcacgacccattcaggagcctccaggagcccagacacc

SEQ ID NO: 35323 - DNA, 40 bp, Artificial Sequence
  Description of Artificial Sequence: Synthetic primer
ttatactgtgaggaattttactctaagaaacacaaaaata

SEQ ID NO: 35324 - DNA, 40 bp, Artificial Sequence
  Description of Artificial Sequence: Synthetic primer
cctgaggaaaactagtgagtatatgggagccacctttgac

SEQ ID NO: 35325 - DNA, 40 bp, Artificial Sequence
  Description of Artificial Sequence: Synthetic primer
cgacaggtccgcgggggcccggcgcccctcgccacccccc

SEQ ID NO: 35326 - DNA, 40 bp, Artificial Sequence
  Description of Artificial Sequence: Synthetic primer
ttcccgagcacgagcgcgtccgcaccaccacgactcaacc

SEQ ID NO: 35327 - DNA, 40 bp, Artificial Sequence
  Description of Artificial Sequence: Synthetic primer
agcatgagaaactgttagtacgcatacctcagttcaaacc

SEQ ID NO: 35328 - DNA, 40 bp, Artificial Sequence
  Description of Artificial Sequence: Synthetic primer
ccaggcctgtgaccaagtttacagtcatctagtttctctc

SEQ ID NO: 35329 - DNA, 40 bp, Artificial Sequence
  Description of Artificial Sequence: Synthetic primer
tgtagattctagtgaaaattacatagtcataagagaaatg

SEQ ID NO: 35330 - DNA, 40 bp, Artificial Sequence
  Description of Artificial Sequence: Synthetic primer
actcgctgagaggagttacagaaaatgatcgactggttta

SEQ ID NO: 35331 - DNA, 40 bp, Artificial Sequence
  Description of Artificial Sequence: Synthetic primer
ctatgagaaacctctgcgaccattcccagatgatgtctgc

SEQ ID NO: 35332 - DNA, 40 bp, Artificial Sequence
  Description of Artificial Sequence: Synthetic primer
cggggggctcctaggctccgaactcggggaacaaacttgc

SEQ ID NO: 35333 - DNA, 40 bp, Artificial Sequence
  Description of Artificial Sequence: Synthetic primer
cgtcgcgcgcggtgttcgattgtcgctgcctggggaggag

SEQ ID NO: 35334 - DNA, 40 bp, Artificial Sequence
  Description of Artificial Sequence: Synthetic primer
cccgctgggtgtcagcttagtgtattcggacaagaagtcg

SEQ ID NO: 35335 - DNA, 40 bp, Artificial Sequence
  Description of Artificial Sequence: Synthetic primer
ttttttgtttgtttgttttaatcctccagtgtatagatcg

SEQ ID NO: 35336 - DNA, 40 bp, Artificial Sequence
  Description of Artificial Sequence: Synthetic primer
ccgcgcttccccgccggcgcagagcaggcctcacagaatc

SEQ ID NO: 35337 - DNA, 40 bp, Artificial Sequence
  Description of Artificial Sequence: Synthetic primer
tccacatcgtcctccctttctctaagaggccatctctaag

SEQ ID NO: 35338 - DNA, 40 bp, Artificial Sequence
  Description of Artificial Sequence: Synthetic primer
ctaaagaaaaatatcttggcctaaacctcagttattacat

SEQ ID NO: 35339 - DNA, 40 bp, Artificial Sequence
  Description of Artificial Sequence: Synthetic primer
tcatcacatttatttcttatattgaaaggcatggtttctg

SEQ ID NO: 35340 - DNA, 40 bp, Artificial Sequence
  Description of Artificial Sequence: Synthetic primer
gatctgcagacatttcatcaggaacagaaactttcaggtg

SEQ ID NO: 35341 - DNA, 40 bp, Artificial Sequence
  Description of Artificial Sequence: Synthetic primer
attcttctgtatctggatctttctgttgacttactagatg

SEQ ID NO: 35342 - DNA, 40 bp, Artificial Sequence
  Description of Artificial Sequence: Synthetic primer
ctgttttatacctctaactaccctcctgatttctctgagg

SEQ ID NO: 35343 - DNA, 40 bp, Artificial Sequence
  Description of Artificial Sequence: Synthetic primer
gccgaagagtggagaaggttgaccaccatttatttaattc

SEQ ID NO: 35344 - DNA, 40 bp, Artificial Sequence
  Description of Artificial Sequence: Synthetic primer
attcgtatgatctactatattttttcctccaacaagcaac

SEQ ID NO: 35345 - DNA, 40 bp, Artificial Sequence
  Description of Artificial Sequence: Synthetic primer
agccttctgaggtttgtccacaatcacggtgctgatgtcc

SEQ ID NO: 35346 - DNA, 40 bp, Artificial Sequence
  Description of Artificial Sequence: Synthetic primer
aatgagcagtcttccaatctgagtccaggcgtttgttcaa

SEQ ID NO: 35347 - DNA, 40 bp, Artificial Sequence
  Description of Artificial Sequence: Synthetic primer
ttgtttctagtggttcctaacccattgtctgataaatgac

SEQ ID NO: 35348 - DNA, 40 bp, Artificial Sequence
  Description of Artificial Sequence: Synthetic primer
acacaccgtgatcttgtcctgtatgctgcccaggcagtcc

SEQ ID NO: 35349 - DNA, 40 bp, Artificial Sequence
  Description of Artificial Sequence: Synthetic primer
aaaaagaaaaacaacttgtataaggctttctgctgcatac

SEQ ID NO: 35350 - DNA, 40 bp, Artificial Sequence
  Description of Artificial Sequence: Synthetic primer
gtaacttaattttcttaagcagtattagcattcacattac

SEQ ID NO: 35351 - DNA, 40 bp, Artificial Sequence
  Description of Artificial Sequence: Synthetic primer
accttgacaatgaggaatgcactggacaccagcgtcgtga

SEQ ID NO: 35352 - DNA, 40 bp, Artificial Sequence
  Description of Artificial Sequence: Synthetic primer
caaggtgggcccggacggcacaccctacgttaccgtgctc

SEQ ID NO: 35353 - DNA, 40 bp, Artificial Sequence
  Description of Artificial Sequence: Synthetic primer
gcggatataatccacagaggccttcaggatggtgcccttg

SEQ ID NO: 35354 - DNA, 40 bp, Artificial Sequence
  Description of Artificial Sequence: Synthetic primer
tgacaggaagaccttgaggtagacggtgagcaggggaaag

SEQ ID NO: 35355 - DNA, 40 bp, Artificial Sequence
  Description of Artificial Sequence: Synthetic primer
ctgattggcaacatgttagctttgaagtggatcctaccag

SEQ ID NO: 35356 - DNA, 40 bp, Artificial Sequence
  Description of Artificial Sequence: Synthetic primer
cccagcttgaatgcatgacctggaatcagatgaacttagg

SEQ ID NO: 35357 - DNA, 40 bp, Artificial Sequence
  Description of Artificial Sequence: Synthetic primer
gcccaggagaagctggaactggcagagaagaaggctgctg

SEQ ID NO: 35358 - DNA, 40 bp, Artificial Sequence
  Description of Artificial Sequence: Synthetic primer
cacatgtcaagagcaaatctttgaagggatgtgtggcaag

SEQ ID NO: 35359 - DNA, 40 bp, Artificial Sequence
  Description of Artificial Sequence: Synthetic primer
ctaaatgactaagaaagtcacatcattcttttcggcaaac

SEQ ID NO: 35360 - DNA, 40 bp, Artificial Sequence
  Description of Artificial Sequence: Synthetic primer
cttcttgtcagggtagttgatgctgccagcgctcccgaac

SEQ ID NO: 35361 - DNA, 40 bp, Artificial Sequence
  Description of Artificial Sequence: Synthetic primer
cctgcagctgcatggtgacctcttccaagtctttatccag

SEQ ID NO: 35362 - DNA, 40 bp, Artificial Sequence
  Description of Artificial Sequence: Synthetic primer
actgacttctgccttaacatctccagggtgctgtgtcttc

SEQ ID NO: 35363 - DNA, 40 bp, Artificial Sequence
  Description of Artificial Sequence: Synthetic primer
atatgggtgttctcacagtgctccaggagagggcggatgg

SEQ ID NO: 35364 - DNA, 40 bp, Artificial Sequence
  Description of Artificial Sequence: Synthetic primer
tgggccttatgtgggagagcagaggtcaaacctgaaagac

SEQ ID NO: 35365 - DNA, 40 bp, Artificial Sequence
  Description of Artificial Sequence: Synthetic primer
ggagaggattctgacatgctattaggcaacagactcaaag

SEQ ID NO: 35366 - DNA, 40 bp, Artificial Sequence
  Description of Artificial Sequence: Synthetic primer
atcccccgacagcgagccagtcctagagaaggatgacctc

SEQ ID NO: 35367 - DNA, 40 bp, Artificial Sequence
  Description of Artificial Sequence: Synthetic primer
ggcaacgtttggattgcaaagtcatcagccggtgccaaag

SEQ ID NO: 35368 - DNA, 40 bp, Artificial Sequence
  Description of Artificial Sequence: Synthetic primer
gtatcagaaggtccccgtgctctttcacctggacgtgacc

SEQ ID NO: 35369 - DNA, 40 bp, Artificial Sequence
  Description of Artificial Sequence: Synthetic primer
agtcataggggactgaggagcaagggtggccttgaagagg

SEQ ID NO: 35370 - DNA, 40 bp, Artificial Sequence
  Description of Artificial Sequence: Synthetic primer
tggtgggcaggagcaagccctagatagccccagagggatg

SEQ ID NO: 35371 - DNA, 40 bp, Artificial Sequence
  Description of Artificial Sequence: Synthetic primer
cttttcaggaggtgtaaaacaagaaaaaacagaggatggc

SEQ ID NO: 35372 - DNA, 40 bp, Artificial Sequence
  Description of Artificial Sequence: Synthetic primer
tcccctcagcccacagcactgtctttttgctgatccaccc

SEQ ID NO: 35373 - DNA, 40 bp, Artificial Sequence
  Description of Artificial Sequence: Synthetic primer
aattgttatcagaggactaaataccattccattgtttgtg

SEQ ID NO: 35374 - DNA, 40 bp, Artificial Sequence
  Description of Artificial Sequence: Synthetic primer
ggcaccctcgttgctgacgacccatcgggggaggctgctg

SEQ ID NO: 35375 - DNA, 40 bp, Artificial Sequence
  Description of Artificial Sequence: Synthetic primer
acctcacacacctgttgtcagcatcgagccaacaccaacc

SEQ ID NO: 35376 - DNA, 40 bp, Artificial Sequence
  Description of Artificial Sequence: Synthetic primer
gtgggctcagctcccactcacatccctcggcagcgaggac

SEQ ID NO: 35377 - DNA, 40 bp, Artificial Sequence
  Description of Artificial Sequence: Synthetic primer
ggtctacatcctgcatctcccgagacatgtccctgctgtc

SEQ ID NO: 35378 - DNA, 40 bp, Artificial Sequence
  Description of Artificial Sequence: Synthetic primer
ggctgaaccgttactttttgtctcagtcccagattcttgc

SEQ ID NO: 35379 - DNA, 40 bp, Artificial Sequence
  Description of Artificial Sequence: Synthetic primer
gcggccaagcccacgagtgcaaggactgcgagcggatgtt

SEQ ID NO: 35380 - DNA, 40 bp, Artificial Sequence
  Description of Artificial Sequence: Synthetic primer
gaacagtgtaactttacattcatcagggatgacaaactat

SEQ ID NO: 35381 - DNA, 40 bp, Artificial Sequence
  Description of Artificial Sequence: Synthetic primer
accgccgtctggttggccggcagccccgcctgcaggatgg

SEQ ID NO: 35382 - DNA, 40 bp, Artificial Sequence
  Description of Artificial Sequence: Synthetic primer
ttccctcggacactttgccccgggccactgacagcaggat

SEQ ID NO: 35383 - DNA, 40 bp, Artificial Sequence
  Description of Artificial Sequence: Synthetic primer
ggagtgtctttcccacaactagaactttcctttacaagat

SEQ ID NO: 35384 - DNA, 40 bp, Artificial Sequence
  Description of Artificial Sequence: Synthetic primer
cgatgttcagtaggaactgggcgaaaggcgtgcccaggtg

SEQ ID NO: 35385 - DNA, 40 bp, Artificial Sequence
  Description of Artificial Sequence: Synthetic primer
atgggcccgccgggcctgctccagcgcatcctcgtcctct

SEQ ID NO: 35386 - DNA, 40 bp, Artificial Sequence
  Description of Artificial Sequence: Synthetic primer
gctcctccttggtcttcaccaggtcatcctgggcttcttt

SEQ ID NO: 35387 - DNA, 40 bp, Artificial Sequence
  Description of Artificial Sequence: Synthetic primer
tgccgtagccttgacgcaggatgacctcgggcgcgatgta

SEQ ID NO: 35388 - DNA, 40 bp, Artificial Sequence
  Description of Artificial Sequence: Synthetic primer
gaatttctgcttttcatgccacctctctgaggtatgtatt

SEQ ID NO: 35389 - DNA, 40 bp, Artificial Sequence
  Description of Artificial Sequence: Synthetic primer
gggggttgacaatccaaggagttagcattggggcagcatt

SEQ ID NO: 35390 - DNA, 40 bp, Artificial Sequence
  Description of Artificial Sequence: Synthetic primer
actctctggtgtacgtctgagtggggatggggtaggcttc

SEQ ID NO: 35391 - DNA, 40 bp, Artificial Sequence
  Description of Artificial Sequence: Synthetic primer
ctcttgttgctgtcaatctgaggtttctttgttccatcct

SEQ ID NO: 35392 - DNA, 40 bp, Artificial Sequence
  Description of Artificial Sequence: Synthetic primer
tccatagatggaatagtatagtaaccaaccttagtgagaa

SEQ ID NO: 35393 - DNA, 40 bp, Artificial Sequence
  Description of Artificial Sequence: Synthetic primer
aagtccagggacgccgacaccaactccaagtccagggatg

SEQ ID NO: 35394 - DNA, 40 bp, Artificial Sequence
  Description of Artificial Sequence: Synthetic primer
ggctcttcaaccttctgaagaccggccaccggatggagag

SEQ ID NO: 35395 - DNA, 40 bp, Artificial Sequence
  Description of Artificial Sequence: Synthetic primer
ttattttgatgtcactatataaatacaaggatgttaactg

SEQ ID NO: 35396 - DNA, 40 bp, Artificial Sequence
  Description of Artificial Sequence: Synthetic primer
atccaagcaccgtctgctttgaaaacctccaaagcctagt

SEQ ID NO: 35397 - DNA, 40 bp, Artificial Sequence
  Description of Artificial Sequence: Synthetic primer
cgatgttgaccttctcatgcaatgccttcatgaaacccac

SEQ ID NO: 35398 - DNA, 40 bp, Artificial Sequence
  Description of Artificial Sequence: Synthetic primer
ttatttttgagacacactttgtcagagacatccacgattg

SEQ ID NO: 35399 - DNA, 40 bp, Artificial Sequence
  Description of Artificial Sequence: Synthetic primer
gcctgaatgaacccgggtggacagcagggatgtggctgac

SEQ ID NO: 35400 - DNA, 40 bp, Artificial Sequence
  Description of Artificial Sequence: Synthetic primer
gccacagctgtgagggccaagatgctgtccccccatccaa

SEQ ID NO: 35401 - DNA, 40 bp, Artificial Sequence
  Description of Artificial Sequence: Synthetic primer
gatcacgcgtgtgctctcctgccgggggctggatggcttc

SEQ ID NO: 35402 - DNA, 40 bp, Artificial Sequence; identical to SEQ ID NO: 29461
  Description of Artificial Sequence: Synthetic primer

SEQ ID NO: 35403 - DNA, 40 bp, Artificial Sequence
  Description of Artificial Sequence: Synthetic primer
cttcagtttgattgtcctgaggatgccaacacatatattc

SEQ ID NO: 35404 - DNA, 40 bp, Artificial Sequence
  Description of Artificial Sequence: Synthetic primer
gtctaccagctcatgtccggacggatgcctgccgcgtcca

SEQ ID NO: 35405 - DNA, 40 bp, Artificial Sequence
  Description of Artificial Sequence: Synthetic primer
tggtggggggaagccagttcatccatggacacagcacaca

SEQ ID NO: 35406 - DNA, 40 bp, Artificial Sequence
  Description of Artificial Sequence: Synthetic primer
aaaaggccttcagcgttgctttggatggccccgcctcctt

SEQ ID NO: 35407 - DNA, 40 bp, Artificial Sequence
  Description of Artificial Sequence: Synthetic primer
catggtcttgcctttggaggctaatctgcaggctgccatc

SEQ ID NO: 35408 - DNA, 40 bp, Artificial Sequence
  Description of Artificial Sequence: Synthetic primer
cattatctgttctttttaaagctccatccttatggggaca

SEQ ID NO: 35409 - DNA, 40 bp, Artificial Sequence
  Description of Artificial Sequence: Synthetic primer
ttactgaagaggatttggatgtttttaagcaggcccagga

SEQ ID NO: 35410 - DNA, 40 bp, Artificial Sequence
  Description of Artificial Sequence: Synthetic primer
gccctgtgccctccacttgcagccagggactgggcatcca

SEQ ID NO: 35411 - DNA, 40 bp, Artificial Sequence
  Description of Artificial Sequence: Synthetic primer
tgggatccacctactagacccagatgtggttgcacggttc

SEQ ID NO: 35412 - DNA, 40 bp, Artificial Sequence
  Description of Artificial Sequence: Synthetic primer
tgatgatgtgtatatatatgtgaggatgtatcgggaagat

SEQ ID NO: 35413 - DNA, 40 bp, Artificial Sequence
  Description of Artificial Sequence: Synthetic primer
gacaaacaccaattgttgcatagaatgagatgttgtcttg

SEQ ID NO: 35414 - DNA, 40 bp, Artificial Sequence
  Description of Artificial Sequence: Synthetic primer
tttgacttcgtttttaggatgtcagctggcagatgcagaa

SEQ ID NO: 35415 - DNA, 40 bp, Artificial Sequence
  Description of Artificial Sequence: Synthetic primer
gtctctccagcagagggccaggtcaagctcaccaaagctg

SEQ ID NO: 35416 - DNA, 40 bp, Artificial Sequence
  Description of Artificial Sequence: Synthetic primer
ctcccagtgcaagtattatttcatccagtgtgctcagttc

SEQ ID NO: 35417 - DNA, 40 bp, Artificial Sequence
  Description of Artificial Sequence: Synthetic primer
gtacgcctcgaagtggatgctgctggtgatgtccttgatg

SEQ ID NO: 35418 - DNA, 40 bp, Artificial Sequence
  Description of Artificial Sequence: Synthetic primer
aggtgtttgtccagtacatccagaatgtcacaacagatta

SEQ ID NO: 35419 - DNA, 40 bp, Artificial Sequence
  Description of Artificial Sequence: Synthetic primer
tggtgtaatctcttaataaactggttcttcaaaaatcatc

SEQ ID NO: 35420 - DNA, 40 bp, Artificial Sequence
  Description of Artificial Sequence: Synthetic primer
cttgatggcagatttctgcatttgtggccactgctgaacc

SEQ ID NO: 35421 - DNA, 40 bp, Artificial Sequence
  Description of Artificial Sequence: Synthetic primer
gtccagccttacctacagcaggaaactgcaccagctagac

SEQ ID NO: 35422 - DNA, 40 bp, Artificial Sequence
  Description of Artificial Sequence: Synthetic primer
gtgtcagatataataggaggaaggatttgctaggatgtct

SEQ ID NO: 35423 - DNA, 40 bp, Artificial Sequence
  Description of Artificial Sequence: Synthetic primer
gattgcaccctccataaatgacagctcatcatccttgtct

SEQ ID NO: 35424 - DNA, 40 bp, Artificial Sequence
  Description of Artificial Sequence: Synthetic primer
tgcagttggttggtctgcctcttgggcttgttagggttgg

SEQ ID NO: 35425 - DNA, 40 bp, Artificial Sequence
  Description of Artificial Sequence: Synthetic primer
gatggctccagaaagtttgatggatggaatcttcactact

SEQ ID NO: 35426 - DNA, 40 bp, Artificial Sequence
  Description of Artificial Sequence: Synthetic primer
tggcacacggtgaacagcccatccctggtctcatcaatta

SEQ ID NO: 35427 - DNA, 40 bp, Artificial Sequence
  Description of Artificial Sequence: Synthetic primer
ggccgtttccttgagtcaaaagcccagcaggattgcatta

SEQ ID NO: 35428 - DNA, 40 bp, Artificial Sequence
  Description of Artificial Sequence: Synthetic primer
gggtccagcgtggggcccgggggatcgagggcatccagca

SEQ ID NO: 35429 - DNA, 40 bp, Artificial Sequence
  Description of Artificial Sequence: Synthetic primer
tgacgttgcgggtctcccaagctaagaaacaaccgaacaa

SEQ ID NO: 35430 - DNA, 40 bp, Artificial Sequence
  Description of Artificial Sequence: Synthetic primer
cagagcatattggaggttgcctgtgtgttccccacccatc

SEQ ID NO: 35431 - DNA, 40 bp, Artificial Sequence
  Description of Artificial Sequence: Synthetic primer
gtcttgatttttacattgccatttgtgatatttttagcag

SEQ ID NO: 35432 - DNA, 40 bp, Artificial Sequence
  Description of Artificial Sequence: Synthetic primer
gcccccgtacccggacggggatggggcgaggaggggtgct

SEQ ID NO: 35433 - DNA, 40 bp, Artificial Sequence
  Description of Artificial Sequence: Synthetic primer
aaaggatcacggaagccgtggcagcccatgtggatggtgt

SEQ ID NO: 35434 - DNA, 40 bp, Artificial Sequence
  Description of Artificial Sequence: Synthetic primer
aagccaaactgtcggcttcaaagagaaaaggcaacatcct

SEQ ID NO: 35435 - DNA, 40 bp, Artificial Sequence
  Description of Artificial Sequence: Synthetic primer
gatgcattacctgcatgtcaccctgaagcccgccatcgag

SEQ ID NO: 35436 - DNA, 40 bp, Artificial Sequence
  Description of Artificial Sequence: Synthetic primer
gtgacagcattcttgtgaatgtttacatcctgctgctgat

SEQ ID NO: 35437 - DNA, 40 bp, Artificial Sequence
  Description of Artificial Sequence: Synthetic primer
actccctgagattaccccagttagcatccacaaataagaa

SEQ ID NO: 35438 - DNA, 40 bp, Artificial Sequence
  Description of Artificial Sequence: Synthetic primer
ccttcgagatggacggatgctcatcaagctgctggaggtc

SEQ ID NO: 35439 - DNA, 40 bp, Artificial Sequence
  Description of Artificial Sequence: Synthetic primer
agggcaaaacactttcaggcggatgcacagtaaggaaaaa

SEQ ID NO: 35440 - DNA, 40 bp, Artificial Sequence
  Description of Artificial Sequence: Synthetic primer
gtgacatggctgctgtgcccgccgtagatgtggcttggag

SEQ ID NO: 35441 - DNA, 40 bp, Artificial Sequence
  Description of Artificial Sequence: Synthetic primer
tggagcaggagatcatccagtacaactttaaaacttcctt

SEQ ID NO: 35442 - DNA, 40 bp, Artificial Sequence
  Description of Artificial Sequence: Synthetic primer
cctcgggttttccaacttcttgctgaatgaatgtgccaac

SEQ ID NO: 35443 - DNA, 40 bp, Artificial Sequence
  Description of Artificial Sequence: Synthetic primer
cacagaggacccctgcagctactctttggatgttttcaat

SEQ ID NO: 35444 - DNA, 40 bp, Artificial Sequence
  Description of Artificial Sequence: Synthetic primer
tgtgtgaaaaatttttacaggaagtagacttttttcagag

SEQ ID NO: 35445 - DNA, 40 bp, Artificial Sequence
  Description of Artificial Sequence: Synthetic primer
ctgtgggactttggggatggcaccgtcagcctggggagca

SEQ ID NO: 35446 - DNA, 40 bp, Artificial Sequence
  Description of Artificial Sequence: Synthetic primer
ctgctgccttcccacaacattaaactctccttcctcagtg

SEQ ID NO: 35447 - DNA, 40 bp, Artificial Sequence
  Description of Artificial Sequence: Synthetic primer
ccactgcacaggaaacataggctacacgctgtactcatcc

SEQ ID NO: 35448 - DNA, 40 bp, Artificial Sequence
  Description of Artificial Sequence: Synthetic primer
catagtaatcgctctgactgctccatccacttttggaact

SEQ ID NO: 35449 - DNA, 40 bp, Artificial Sequence
  Description of Artificial Sequence: Synthetic primer
agcaaggcggtcagccactggactccggaactggaggaag

SEQ ID NO: 35450 - DNA, 40 bp, Artificial Sequence
  Description of Artificial Sequence: Synthetic primer
ccacactctcatccagttccgatgcccctgccctccctct

SEQ ID NO: 35451 - DNA, 40 bp, Artificial Sequence
  Description of Artificial Sequence: Synthetic primer
ggcagcattctccagggaagacccatcccctagtgccaga

SEQ ID NO: 35452 - DNA, 40 bp, Artificial Sequence
  Description of Artificial Sequence: Synthetic primer
tcaccggcttcgttgtcgtcactgggttggatgtaggact

SEQ ID NO: 35453 - DNA, 40 bp, Artificial Sequence
  Description of Artificial Sequence: Synthetic primer
gggcctcatgctggtcctgctccacctcatccatcccata

SEQ ID NO: 35454 - DNA, 40 bp, Artificial Sequence
  Description of Artificial Sequence: Synthetic primer
ccaaatttatataccagtcttcgtccatccacacgctcca

SEQ ID NO: 35455 - DNA, 40 bp, Artificial Sequence
  Description of Artificial Sequence: Synthetic primer
gttcctgcttctctaggcaaggtcccgtcatagcaattat

SEQ ID NO: 35456 - DNA, 40 bp, Artificial Sequence
  Description of Artificial Sequence: Synthetic primer
gacttaaagccaccaactccagcatccacaccacacagtc

SEQ ID NO: 35457 - DNA, 40 bp, Artificial Sequence
  Description of Artificial Sequence: Synthetic primer
gctgccaagagccccgtgcatccaggcggccaagcacaaa

SEQ ID NO: 35458 - DNA, 40 bp, Artificial Sequence
  Description of Artificial Sequence: Synthetic primer
ggtgctgtagaatatatggttgaggttgcatccacgaagg

SEQ ID NO: 35459 - DNA, 40 bp, Artificial Sequence
  Description of Artificial Sequence: Synthetic primer
aatttaagcttactgatgaaaaactcatccacttgcctta

SEQ ID NO: 35460 - DNA, 40 bp, Artificial Sequence
  Description of Artificial Sequence: Synthetic primer
cccggcgcctttccgggccattcggcggggcacgacaaac

SEQ ID NO: 35461 - DNA, 40 bp, Artificial Sequence
  Description of Artificial Sequence: Synthetic primer
gatgactgagtttggataaggacttagaagccatagtttt

SEQ ID NO: 35462 - DNA, 40 bp, Artificial Sequence
  Description of Artificial Sequence: Synthetic primer
gatgtggtgcttggaatcggggtgaatggcgtccttccag

SEQ ID NO: 35463 - DNA, 40 bp, Artificial Sequence
  Description of Artificial Sequence: Synthetic primer
aacattcttcagattgtggatgtgtgtcatgacgtagaaa

SEQ ID NO: 35464 - DNA, 40 bp, Artificial Sequence
  Description of Artificial Sequence: Synthetic primer
ttctgccagcatttctggatggatatagggactatcatta

SEQ ID NO: 35465 - DNA, 40 bp, Artificial Sequence
  Description of Artificial Sequence: Synthetic primer
aggcccagctgaggggcaccagacagaggatgaggagaga

SEQ ID NO: 35466 - DNA, 40 bp, Artificial Sequence
  Description of Artificial Sequence: Synthetic primer
tgataaggttgttcatgtatggactcgacatctttatgag

SEQ ID NO: 35467 - DNA, 40 bp, Artificial Sequence
  Description of Artificial Sequence: Synthetic primer
ctctttccttgtctctccaacatgaagaggtgacttctgg

SEQ ID NO: 35468 - DNA, 40 bp, Artificial Sequence
  Description of Artificial Sequence: Synthetic primer
acctccgccctccgcatcctcccgccctcccccgcccttt

SEQ ID NO: 35469 - DNA, 40 bp, Artificial Sequence
  Description of Artificial Sequence: Synthetic primer
aggagcacctttctggaaccccctatagcatccaagtttc

SEQ ID NO: 35470 - DNA, 40 bp, Artificial Sequence
  Description of Artificial Sequence: Synthetic primer
ctgtcaaggagcgcgcacgagcagcacagcggcttggaac

SEQ ID NO: 35471 - DNA, 40 bp, Artificial Sequence
  Description of Artificial Sequence: Synthetic primer
gaagactggtcttttgtgatggatgaagaaaggtccagta

SEQ ID NO: 35472 - DNA, 40 bp, Artificial Sequence
  Description of Artificial Sequence: Synthetic primer
gggctgttactctcatcatccagcttcttttccttgtctt

SEQ ID NO: 35473 - DNA, 40 bp, Artificial Sequence
  Description of Artificial Sequence: Synthetic primer
cgctccttggggaaggggttggccacaggcatccggacat

SEQ ID NO: 35474 - DNA, 40 bp, Artificial Sequence
  Description of Artificial Sequence: Synthetic primer
acctgcgtcgtggagaacaagtttggcagcatccggcaga

SEQ ID NO: 35475 - DNA, 40 bp, Artificial Sequence; identical to SEQ ID NO: 29386
  Description of Artificial Sequence: Synthetic primer

SEQ ID NO: 35476 - DNA, 40 bp, Artificial Sequence
  Description of Artificial Sequence: Synthetic primer
acaaatgaaggatgagctttgtggcaagcaaaatcagcag

SEQ ID NO: 35477 - DNA, 40 bp, Artificial Sequence
  Description of Artificial Sequence: Synthetic primer
gatggtggatgcgcccagcgcaggtggcgagcttgttgtc

SEQ ID NO: 35478 - DNA, 40 bp, Artificial Sequence
  Description of Artificial Sequence: Synthetic primer
ctccaggtcctcctccatacccattatagccatccccaaa

SEQ ID NO: 35479 - DNA, 40 bp, Artificial Sequence
  Description of Artificial Sequence: Synthetic primer
atccaaacaagaactagagacagaactggagcgactgaag

SEQ ID NO: 35480 - DNA, 40 bp, Artificial Sequence
  Description of Artificial Sequence: Synthetic primer
ttgtttaaggcttaatatccttgcagaagccatcctgtgt

SEQ ID NO: 35481 - DNA, 40 bp, Artificial Sequence
  Description of Artificial Sequence: Synthetic primer
ctgggttcaaggccacatgtgctcctgtcatcctccacat

SEQ ID NO: 35482 - DNA, 40 bp, Artificial Sequence
  Description of Artificial Sequence: Synthetic primer
ttctaagatgaaagatttccttttcactccaattcacatc

SEQ ID NO: 35483 - DNA, 40 bp, Artificial Sequence
  Description of Artificial Sequence: Synthetic primer
ggtgcctttttggcatcacacctcatcatccaaagcctgt

SEQ ID NO: 35484 - DNA, 40 bp, Artificial Sequence
  Description of Artificial Sequence: Synthetic primer
gccggatcaccatctgaagagcagacggatggaaaaagga

SEQ ID NO: 35485 - DNA, 40 bp, Artificial Sequence
  Description of Artificial Sequence: Synthetic primer
tggtaggaaggcatgtaggagatgtcagaagggtacttgt

SEQ ID NO: 35486 - DNA, 40 bp, Artificial Sequence
  Description of Artificial Sequence: Synthetic primer
cagtgcagactccaatggcaaacaccaccatccacttcac

SEQ ID NO: 35487 - DNA, 40 bp, Artificial Sequence
  Description of Artificial Sequence: Synthetic primer
ttgtccttatcaacgtgaacccttgtgcggaaggctggat

SEQ ID NO: 35488 - DNA, 40 bp, Artificial Sequence
  Description of Artificial Sequence: Synthetic primer
tgggcctccgtaggtagggcctcatccccctcgggccaca

SEQ ID NO: 35489 - DNA, 40 bp, Artificial Sequence
  Description of Artificial Sequence: Synthetic primer
gaaagtgacttgttgatgtttttagcttcatccagcacag

SEQ ID NO: 35490 - DNA, 40 bp, Artificial Sequence
  Description of Artificial Sequence: Synthetic primer
tggtggactccaggatgttctatatatacaactctagaga

SEQ ID NO: 35491 - DNA, 40 bp, Artificial Sequence
  Description of Artificial Sequence: Synthetic primer
gatttcagtgggccttgggcagcaatataagcttttggtc

SEQ ID NO: 35492 - DNA, 40 bp, Artificial Sequence
  Description of Artificial Sequence: Synthetic primer
ccctctgtagccggagccgagacagccgacagcgaactcc

SEQ ID NO: 35493 - DNA, 40 bp, Artificial Sequence
  Description of Artificial Sequence: Synthetic primer
aggtgaaagggatgtagtgcaggatggagaagatgtccag

SEQ ID NO: 35494 - DNA, 40 bp, Artificial Sequence
  Description of Artificial Sequence: Synthetic primer
tgtgaactttgtccccataaggatggagctttaaaaagaa

SEQ ID NO: 35495 - DNA, 40 bp, Artificial Sequence
  Description of Artificial Sequence: Synthetic primer
taaaaaagctgcagcagactcaggagtacttcatcatcca

SEQ ID NO: 35496 - DNA, 40 bp, Artificial Sequence
  Description of Artificial Sequence: Synthetic primer
gaagctggatgcccagaaaggatcaagagcagcccaggaa

SEQ ID NO: 35497 - DNA, 40 bp, Artificial Sequence
  Description of Artificial Sequence: Synthetic primer
cacagagcttccagacctttccatgcgttgtgctctccag

SEQ ID NO: 35498 - DNA, 40 bp, Artificial Sequence
  Description of Artificial Sequence: Synthetic primer
cgacgccgcgtagcccaccagccactgcgagtacacgttc

SEQ ID NO: 35499 - DNA, 40 bp, Artificial Sequence
  Description of Artificial Sequence: Synthetic primer
actcggagactcagctgcaggatgtggacatagcaagtca

SEQ ID NO: 35500 - DNA, 40 bp, Artificial Sequence
  Description of Artificial Sequence: Synthetic primer
tgtggggaatagtgtgaacaacatcccagctgctatgacc

SEQ ID NO: 35501 - DNA, 40 bp, Artificial Sequence
  Description of Artificial Sequence: Synthetic primer
cctgccctaccccatccaccaagtgcgccacatggccttc

SEQ ID NO: 35502 - DNA, 40 bp, Artificial Sequence
  Description of Artificial Sequence: Synthetic primer
agtggtcacagctggatgtttgcgacatcccagagagctt

SEQ ID NO: 35503 - DNA, 40 bp, Artificial Sequence
  Description of Artificial Sequence: Synthetic primer
gggcggcaccttctggaagttgaggctggcctcggggatg

SEQ ID NO: 35504 - DNA, 40 bp, Artificial Sequence
  Description of Artificial Sequence: Synthetic primer
tctggaggcatccagcgaatgggcagcattgtgtggccac

SEQ ID NO: 35505 - DNA, 40 bp, Artificial Sequence
  Description of Artificial Sequence: Synthetic primer
tttcaaggggagttctgtaaacttctctgcaagatggatg

SEQ ID NO: 35506 - DNA, 40 bp, Artificial Sequence
  Description of Artificial Sequence: Synthetic primer
tcgtcctctaacacatccataatacagttagatttaagca

SEQ ID NO: 35507 - DNA, 40 bp, Artificial Sequence
  Description of Artificial Sequence: Synthetic primer
atgatatatgaagattacatttctatactatcaccaaaag

SEQ ID NO: 35508 - DNA, 40 bp, Artificial Sequence
  Description of Artificial Sequence: Synthetic primer
ctctagcggagccggtttgctgccatccgcccaacttcag

SEQ ID NO: 35509 - DNA, 40 bp, Artificial Sequence
  Description of Artificial Sequence: Synthetic primer
tcgtctttccgatcttccgacaagcccatccggaccccta

SEQ ID NO: 35510 - DNA, 40 bp, Artificial Sequence
  Description of Artificial Sequence: Synthetic primer
tcccgccatcaagttcatactctcttactcacacttctgg

SEQ ID NO: 35511 - DNA, 40 bp, Artificial Sequence
  Description of Artificial Sequence: Synthetic primer
gccagccgagacaggatggcctgggcctggtcggggtgct

SEQ ID NO: 35512 - DNA, 40 bp, Artificial Sequence
  Description of Artificial Sequence: Synthetic primer
gatgctgagggcaggccccagtattccggctaaccactcc

SEQ ID NO: 35513 - DNA, 40 bp, Artificial Sequence
  Description of Artificial Sequence: Synthetic primer
tcctcactcacttcttcctcatcctccgagtccatgtggt

SEQ ID NO: 35514 - DNA, 40 bp, Artificial Sequence
  Description of Artificial Sequence: Synthetic primer
tccactgcaggcgagctgtccccaaccaccaacagagcag

SEQ ID NO: 35515 - DNA, 40 bp, Artificial Sequence
  Description of Artificial Sequence: Synthetic primer
ctgggttcttgtctgggttcaagaggatgtcgcggatgaa

SEQ ID NO: 35516 - DNA, 40 bp, Artificial Sequence
  Description of Artificial Sequence: Synthetic primer
ttcccctcacagaggatgagctcaaagagttccacatgaa

SEQ ID NO: 35517 - DNA, 40 bp, Artificial Sequence
  Description of Artificial Sequence: Synthetic primer
tggcttcttgtgcattgcattatgatgttgactggatgta

SEQ ID NO: 35518 - DNA, 40 bp, Artificial Sequence
  Description of Artificial Sequence: Synthetic primer
ttcgatgtgcccgcaacttgtcctgttgctatcgtgatcc

SEQ ID NO: 35519 - DNA, 40 bp, Artificial Sequence
  Description of Artificial Sequence: Synthetic primer
aaggaaatatctgtcctatttccagatgcaacaaaactgg

SEQ ID NO: 35520 - DNA, 40 bp, Artificial Sequence
  Description of Artificial Sequence: Synthetic primer
gagaactaaggatcccgttgaaagtcctgcggcagtccag

SEQ ID NO: 35521 - DNA, 40 bp, Artificial Sequence
  Description of Artificial Sequence: Synthetic primer
aacaccaaatcccgcctgggccatgaggtagcagaagtgg

SEQ ID NO: 35522 - DNA, 40 bp, Artificial Sequence
  Description of Artificial Sequence: Synthetic primer
ccatcagtgttggtttcaacatggatgtatcccctttgct

SEQ ID NO: 35523 - DNA, 40 bp, Artificial Sequence
  Description of Artificial Sequence: Synthetic primer
tccggcctttggcggagaaaaccggcatctgcaaaattcg

SEQ ID NO: 35524 - DNA, 40 bp, Artificial Sequence
  Description of Artificial Sequence: Synthetic primer
ggctgcgttcagactggggcactgccatcccctccgcatc

SEQ ID NO: 35525 - DNA, 40 bp, Artificial Sequence
  Description of Artificial Sequence: Synthetic primer
gcaagatatttttaattatatttactccatggatgaaaat

SEQ ID NO: 35526 - DNA, 40 bp, Artificial Sequence
  Description of Artificial Sequence: Synthetic primer
gaacaatgacaaaagacaatttctgctggagcgactgctg

SEQ ID NO: 35527 - DNA, 40 bp, Artificial Sequence
  Description of Artificial Sequence: Synthetic primer
tttgagacagtttcttagctttttaattgttgtttctttc

SEQ ID NO: 35528 - DNA, 40 bp, Artificial Sequence
  Description of Artificial Sequence: Synthetic primer
aaaaagatgttatattgtgtttgactattttccaacttgt

SEQ ID NO: 35529 - DNA, 40 bp, Artificial Sequence
  Description of Artificial Sequence: Synthetic primer
tggacatcatgggatggatgaggtcatcatgaaaacagat

SEQ ID NO: 35530 - DNA, 40 bp, Artificial Sequence
  Description of Artificial Sequence: Synthetic primer
acgccccttggggatgtaaaagcctttcaaacttgtgtct

SEQ ID NO: 35531 - DNA, 40 bp, Artificial Sequence
  Description of Artificial Sequence: Synthetic primer
aaggagaaaatgtataacgtcttgttgtttgttgatggag

SEQ ID NO: 35532 - DNA, 40 bp, Artificial Sequence
  Description of Artificial Sequence: Synthetic primer
tttttctaccacggggaaatggctcatccacaccaagaat

SEQ ID NO: 35533 - DNA, 40 bp, Artificial Sequence
  Description of Artificial Sequence: Synthetic primer
tccatacaggaaaaaattatatcttatacctggtcgaaac

SEQ ID NO: 35534 - DNA, 40 bp, Artificial Sequence
  Description of Artificial Sequence: Synthetic primer
ttcttccccattgaccagccatccaaatgacagagaaata

SEQ ID NO: 35535 - DNA, 40 bp, Artificial Sequence
  Description of Artificial Sequence: Synthetic primer
acaacctcgtggacttggccatgccctacttcatccaggt

SEQ ID NO: 35536 - DNA, 40 bp, Artificial Sequence
  Description of Artificial Sequence: Synthetic primer
gccatggtgatcatcgaccaagtccagaatggatgaagga

SEQ ID NO: 35537 - DNA, 40 bp, Artificial Sequence
  Description of Artificial Sequence: Synthetic primer
ttctgagagtataccttgaaaagaaacaggatgttgatga

SEQ ID NO: 35538 - DNA, 40 bp, Artificial Sequence
  Description of Artificial Sequence: Synthetic primer
aaagaaaatccaggagctgttggaaaggtaagaccagcag

SEQ ID NO: 35539 - DNA, 40 bp, Artificial Sequence
  Description of Artificial Sequence: Synthetic primer
ttccatctttttcagctccatcccttttctccaggatcag

SEQ ID NO: 35540 - DNA, 40 bp, Artificial Sequence
  Description of Artificial Sequence: Synthetic primer
gctggattgatctccaaagactggatggtatgggctgtct

SEQ ID NO: 35541 - DNA, 40 bp, Artificial Sequence
  Description of Artificial Sequence: Synthetic primer
aggaccagctgctggatgctgggcgggatcccaataacct

SEQ ID NO: 35542 - DNA, 40 bp, Artificial Sequence
  Description of Artificial Sequence: Synthetic primer
cagcagctgacatcaggtttcaagagggaagtacatggat

SEQ ID NO: 35543 - DNA, 40 bp, Artificial Sequence
  Description of Artificial Sequence: Synthetic primer
tcagcgacaactgagtcaggatgattgtaagttatggaga

SEQ ID NO: 35544 - DNA, 40 bp, Artificial Sequence
  Description of Artificial Sequence: Synthetic primer
atgagaacacatcagctgggcgctatgttcgtgagaactg

SEQ ID NO: 35545 - DNA, 40 bp, Artificial Sequence
  Description of Artificial Sequence: Synthetic primer
tgcagcagaggaagccaaatgccctcaacaacacctggag

SEQ ID NO: 35546 - DNA, 40 bp, Artificial Sequence
  Description of Artificial Sequence: Synthetic primer
ggtgcatccagatcaacaccgactccagcctcctcaactc

SEQ ID NO: 35547 - DNA, 40 bp, Artificial Sequence
  Description of Artificial Sequence: Synthetic primer
tgcaagcaagaaatagagaacgaagaacaaggccagagtg

SEQ ID NO: 35548 - DNA, 40 bp, Artificial Sequence
  Description of Artificial Sequence: Synthetic primer
gctggccccactttaatggatgtgttctccaggggagttg

SEQ ID NO: 35549 - DNA, 40 bp, Artificial Sequence
  Description of Artificial Sequence: Synthetic primer
ctgtctctgtactgatgggcagcttcatgtcaggcaaatc

SEQ ID NO: 35550 - DNA, 40 bp, Artificial Sequence
  Description of Artificial Sequence: Synthetic primer
ttcccacaatcctctacttcagtgggatgctgtgtctagt

SEQ ID NO: 35551 - DNA, 40 bp, Artificial Sequence
  Description of Artificial Sequence: Synthetic primer
gcctacagtgacgaagtacggaatgagctcctgggggatg

SEQ ID NO: 35552 - DNA, 40 bp, Artificial Sequence
  Description of Artificial Sequence: Synthetic primer
tgtgatgcaggctaccttcatcctggcttctgcggctgga

SEQ ID NO: 35553 - DNA, 40 bp, Artificial Sequence
  Description of Artificial Sequence: Synthetic primer
gtcatcttgatggtagctgggacataacccctgccatcct

SEQ ID NO: 35554 - DNA, 40 bp, Artificial Sequence
  Description of Artificial Sequence: Synthetic primer
agtttccaatttttctagcatgaaatcacttttctcttcc

SEQ ID NO: 35555 - DNA, 40 bp, Artificial Sequence
  Description of Artificial Sequence: Synthetic primer
gcccgacgacctgtgtccgcagtttcaaaacatccctgct

SEQ ID NO: 35556 - DNA, 40 bp, Artificial Sequence
  Description of Artificial Sequence: Synthetic primer
accctggcatgctgacggggtcagagcggactggctggat

SEQ ID NO: 35557 - DNA, 40 bp, Artificial Sequence
  Description of Artificial Sequence: Synthetic primer
agagaagaatggtggggcacgacttgggatggctggagtt

SEQ ID NO: 35558 - DNA, 40 bp, Artificial Sequence
  Description of Artificial Sequence: Synthetic primer
aaggttatggccaaactgagtgcacagctggatgtacctt

SEQ ID NO: 35559 - DNA, 40 bp, Artificial Sequence
  Description of Artificial Sequence: Synthetic primer
agcagcacggccctcccatcccccgtccgaccccgcctta

SEQ ID NO: 35560 - DNA, 40 bp, Artificial Sequence
  Description of Artificial Sequence: Synthetic primer
ggaggtgcgtcagatccgagctcgccatccagtttcctct

SEQ ID NO: 35561 - DNA, 40 bp, Artificial Sequence
  Description of Artificial Sequence: Synthetic primer
ggctactagaatcatccctggagttatctgctccttcact

SEQ ID NO: 35562 - DNA, 40 bp, Artificial Sequence
  Description of Artificial Sequence: Synthetic primer
aatctaccttgcagtgtaggaattctattgagtggcagtg

SEQ ID NO: 35563 - DNA, 40 bp, Artificial Sequence
  Description of Artificial Sequence: Synthetic primer
tttccattactcgagaggcacaggtcaatgtccggatgga

SEQ ID NO: 35564 - DNA, 40 bp, Artificial Sequence
  Description of Artificial Sequence: Synthetic primer
cagtgctcctgttcctgcatcctgaggaccgacccctcat

SEQ ID NO: 35565 - DNA, 40 bp, Artificial Sequence
  Description of Artificial Sequence: Synthetic primer
aaatgatcctcacggggcagaactttacatccgagtccaa

SEQ ID NO: 35566 - DNA, 40 bp, Artificial Sequence
  Description of Artificial Sequence: Synthetic primer
ggccagcttaatggccttcccctcggcctcgttaagcatc

SEQ ID NO: 35567 - DNA, 40 bp, Artificial Sequence
  Description of Artificial Sequence: Synthetic primer
ggccagcgaggagcagagtcaccaggatggaaaagcctgt

SEQ ID NO: 35568 - DNA, 40 bp, Artificial Sequence
  Description of Artificial Sequence: Synthetic primer
tccaaatctgattgagtcatgcatgtatgggatgaaatct

SEQ ID NO: 35569 - DNA, 40 bp, Artificial Sequence
  Description of Artificial Sequence: Synthetic primer
tgtcaatagttttagctggtgtagaattaggagacgtaac

SEQ ID NO: 35570 - DNA, 40 bp, Artificial Sequence
  Description of Artificial Sequence: Synthetic primer
caaggggcgttgtgtctttgtaaaccagtggcagatcaac

SEQ ID NO: 35571 - DNA, 40 bp, Artificial Sequence
  Description of Artificial Sequence: Synthetic primer
tctggtgcaccactcgtgacttttccaggaggtaactgag

SEQ ID NO: 35572 - DNA, 40 bp, Artificial Sequence
  Description of Artificial Sequence: Synthetic primer
gtggtgcagggagaaccaggggatgagttcttcattattt

SEQ ID NO: 35573 - DNA, 40 bp, Artificial Sequence
  Description of Artificial Sequence: Synthetic primer
gccgccgcccgtgaacggcatcctggtgcccaacggcttc

SEQ ID NO: 35574 - DNA, 40 bp, Artificial Sequence
  Description of Artificial Sequence: Synthetic primer
tccacgaagtagatcagcccaaacttgtccactgtaatgc

SEQ ID NO: 35575 - DNA, 40 bp, Artificial Sequence
  Description of Artificial Sequence: Synthetic primer
gggagaggatgtagccattgttggtgttcagaaaggcgta

SEQ ID NO: 35576 - DNA, 40 bp, Artificial Sequence
  Description of Artificial Sequence: Synthetic primer
gtcaccactgtggctgggataacagtaaccatccctcctt

SEQ ID NO: 35577 - DNA, 40 bp, Artificial Sequence
  Description of Artificial Sequence: Synthetic primer
ggccaagatggcccgaaggagcaagaggagccgcggcaag

SEQ ID NO: 35578 - DNA, 40 bp, Artificial Sequence
  Description of Artificial Sequence: Synthetic primer
tttccaagctgatgggggccatccactgtcttcccatcgt

SEQ ID NO: 35579 - DNA, 40 bp, Artificial Sequence
  Description of Artificial Sequence: Synthetic primer
caggtctcccttgtccaaattgcagtagagcttggtgtag

SEQ ID NO: 35580 - DNA, 40 bp, Artificial Sequence
  Description of Artificial Sequence: Synthetic primer
ccaaatcaattaacaagcagttgacaaaaacacccatgat

SEQ ID NO: 35581 - DNA, 40 bp, Artificial Sequence
  Description of Artificial Sequence: Synthetic primer
ccacaattaaatatgcccaaactgaaaactttaagaaaaa

SEQ ID NO: 35582 - DNA, 40 bp, Artificial Sequence
  Description of Artificial Sequence: Synthetic primer
agcctcatcattttacttttgaaacaggaatgatttctcc

SEQ ID NO: 35583 - DNA, 40 bp, Artificial Sequence
  Description of Artificial Sequence: Synthetic primer
cccctagtcctcttcggcagactcttgtgaggatgtctct

SEQ ID NO: 35584 - DNA, 40 bp, Artificial Sequence
  Description of Artificial Sequence: Synthetic primer
catacacactgcccgcctcgtcagcctccaccagctcctc

SEQ ID NO: 35585 - DNA, 40 bp, Artificial Sequence
  Description of Artificial Sequence: Synthetic primer
ttcaatacagtgggagaaagctgaagataatggatgtaga

SEQ ID NO: 35586 - DNA, 40 bp, Artificial Sequence
  Description of Artificial Sequence: Synthetic primer
gatcagctttctcgtgagggcctcagggatgccttcagct

SEQ ID NO: 35587 - DNA, 40 bp, Artificial Sequence
  Description of Artificial Sequence: Synthetic primer
tcctcctgcttgtcatagtcttcattcctgccttctggag

SEQ ID NO: 35588 - DNA, 40 bp, Artificial Sequence
  Description of Artificial Sequence: Synthetic primer
gcatgctccggctaggggtccggatgggcttgtcggaaga

SEQ ID NO: 35589 - DNA, 40 bp, Artificial Sequence
  Description of Artificial Sequence: Synthetic primer
cttccagacagccacagttagtgcccaaacctgagaggat

SEQ ID NO: 35590 - DNA, 40 bp, Artificial Sequence
  Description of Artificial Sequence: Synthetic primer
gacagcggcacttgacggtgcagttcaagtcatcccaaaa

SEQ ID NO: 35591 - DNA, 40 bp, Artificial Sequence
  Description of Artificial Sequence: Synthetic primer
aaggcatatccaagaggaagtcagtcaccggctccaccag

SEQ ID NO: 35592 - DNA, 40 bp, Artificial Sequence
  Description of Artificial Sequence: Synthetic primer
actggccttgagcaaggagtgcccgggtgtacttgaggat

SEQ ID NO: 35593 - DNA, 40 bp, Artificial Sequence
  Description of Artificial Sequence: Synthetic primer
cttccctggcagggatggcggctccttgaaatctgctgaa

SEQ ID NO: 35594 - DNA, 40 bp, Artificial Sequence
  Description of Artificial Sequence: Synthetic primer
ccttccataatggccttgtggatatcaggatgagaaagga

SEQ ID NO: 35595 - DNA, 40 bp, Artificial Sequence
  Description of Artificial Sequence: Synthetic primer
gacccctagccaggagggccccccatgtccatccatccct

SEQ ID NO: 35596 - DNA, 40 bp, Artificial Sequence
  Description of Artificial Sequence: Synthetic primer
tgtgcaactgaatatccggtcaccgccaatcacaagttgc

SEQ ID NO: 35597 - DNA, 40 bp, Artificial Sequence
  Description of Artificial Sequence: Synthetic primer
actgaatcactataccatgaactgacagaaccctgcatga

SEQ ID NO: 35598 - DNA, 40 bp, Artificial Sequence
  Description of Artificial Sequence: Synthetic primer
agcgacagtggccctgagatggaggagacagaaagcatcc

SEQ ID NO: 35599 - DNA, 40 bp, Artificial Sequence
  Description of Artificial Sequence: Synthetic primer
ctcggtagcgtgggtgaagtgctggtcaggatgaggcttt

SEQ ID NO: 35600 - DNA, 40 bp, Artificial Sequence
  Description of Artificial Sequence: Synthetic primer
tcattgtcactgtcatgtagggatggtgtccgaggcctaa

SEQ ID NO: 35601 - DNA, 40 bp, Artificial Sequence
  Description of Artificial Sequence: Synthetic primer
cctgttaagtgcagatgtcagcctgaacccaggatgcttt

SEQ ID NO: 35602 - DNA, 40 bp, Artificial Sequence
  Description of Artificial Sequence: Synthetic primer
cgacaaacgcaaagcgacccaaaccctggagggtcacatc

SEQ ID NO: 35603 - DNA, 40 bp, Artificial Sequence
  Description of Artificial Sequence: Synthetic primer
gatggggtcctggggcaggacatctgtccagcagcccttc

SEQ ID NO: 35604 - DNA, 40 bp, Artificial Sequence
  Description of Artificial Sequence: Synthetic primer
tttcacgtgtgacagcctaaggtttctttagttttaggat

SEQ ID NO: 35605 - DNA, 40 bp, Artificial Sequence
  Description of Artificial Sequence: Synthetic primer
gtgcaggggatggagacggggcggcactaggtttcatgct

SEQ ID NO: 35606 - DNA, 40 bp, Artificial Sequence
  Description of Artificial Sequence: Synthetic primer
gaagcatcaagcatttatggcagaacttgcatccaacaaa

SEQ ID NO: 35607 - DNA, 40 bp, Artificial Sequence
  Description of Artificial Sequence: Synthetic primer
ccacaactccggaggacttcctcagcaatgtggatgagat

SEQ ID NO: 35608 - DNA, 40 bp, Artificial Sequence
  Description of Artificial Sequence: Synthetic primer
ctcaggaggctgtaggcaatggaactgctgggtggggatg

SEQ ID NO: 35609 - DNA, 40 bp, Artificial Sequence
  Description of Artificial Sequence: Synthetic primer
atgtgatccatctcataaaacccatccacccatccatact

SEQ ID NO: 35610 - DNA, 40 bp, Artificial Sequence
  Description of Artificial Sequence: Synthetic primer
atattggtggctatggatggatattgagaggttaaaagtt

SEQ ID NO: 35611 - DNA, 40 bp, Artificial Sequence
  Description of Artificial Sequence: Synthetic primer
tttggcttctgagatcaggagtcgaggaggaggtggatgt

SEQ ID NO: 35612 - DNA, 40 bp, Artificial Sequence
  Description of Artificial Sequence: Synthetic primer
ttttcagaacaaggagcagacatgcattccatccttaaga

SEQ ID NO: 35613 - DNA, 40 bp, Artificial Sequence
  Description of Artificial Sequence: Synthetic primer
tggccgccaagtcaaggacatagactccatctttggtcac

SEQ ID NO: 35614 - DNA, 40 bp, Artificial Sequence
  Description of Artificial Sequence: Synthetic primer
atggagagcagccgccgcttcgtgaaagaccgcttcacag

SEQ ID NO: 35615 - DNA, 40 bp, Artificial Sequence
  Description of Artificial Sequence: Synthetic primer
cttggagtgcccggttgattactcaggctcatattattgg

SEQ ID NO: 35616 - DNA, 40 bp, Artificial Sequence
  Description of Artificial Sequence: Synthetic primer
gtttgacccagcagactccggttacctttacctgatgacg

SEQ ID NO: 35617 - DNA, 40 bp, Artificial Sequence
  Description of Artificial Sequence: Synthetic primer
gtaggtgtctgccttggagggggatgtagagcctgggact

SEQ ID NO: 35618 - DNA, 40 bp, Artificial Sequence
  Description of Artificial Sequence: Synthetic primer
gatgacactcgctgcggggatggtgggaaggccacagaag

SEQ ID NO: 35619 - DNA, 40 bp, Artificial Sequence
  Description of Artificial Sequence: Synthetic primer
tgctgcactccatgagccggctgttgagcacaaagccatc

SEQ ID NO: 35620 - DNA, 40 bp, Artificial Sequence
  Description of Artificial Sequence: Synthetic primer
gatgccacatatattttctggtagccttccccttatgaat

SEQ ID NO: 35621 - DNA, 40 bp, Artificial Sequence
  Description of Artificial Sequence: Synthetic primer
gctcttccagagcatccgggtgcatgagaagtgaataggt

SEQ ID NO: 35622 - DNA, 40 bp, Artificial Sequence
  Description of Artificial Sequence: Synthetic primer
acttacggtacaggatgctctcgggcggcatccagcgaat

SEQ ID NO: 35623 - DNA, 40 bp, Artificial Sequence
  Description of Artificial Sequence: Synthetic primer
cgtgggtcttggcctcctcctccagggtcttcttcaggat

SEQ ID NO: 35624 - DNA, 40 bp, Artificial Sequence
  Description of Artificial Sequence: Synthetic primer
ggatttggttgcaccttcagaaagttattcatgtgtgctc

SEQ ID NO: 35625 - DNA, 40 bp, Artificial Sequence
  Description of Artificial Sequence: Synthetic primer
caggcccctccaacggaacaggagtcgaggggcagtgagg

SEQ ID NO: 35626 - DNA, 40 bp, Artificial Sequence
  Description of Artificial Sequence: Synthetic primer
aggagccagccgcctccctggccgtgggctttgaccacac

SEQ ID NO: 35627 - DNA, 40 bp, Artificial Sequence
  Description of Artificial Sequence: Synthetic primer
cttctataagtaggtggtgctgtggtccaaggcatctaag

SEQ ID NO: 35628 - DNA, 40 bp, Artificial Sequence
  Description of Artificial Sequence: Synthetic primer
ttaaacagaaccactaccaagagctcaatgacatcctcaa

SEQ ID NO: 35629 - DNA, 40 bp, Artificial Sequence
  Description of Artificial Sequence: Synthetic primer
ccttcggatgctgcaggggcctccccaggagaagctgcaa

SEQ ID NO: 35630 - DNA, 40 bp, Artificial Sequence
  Description of Artificial Sequence: Synthetic primer
tcacccacacaaccgtaccacctaatgcaacacatccaat

SEQ ID NO: 35631 - DNA, 40 bp, Artificial Sequence
  Description of Artificial Sequence: Synthetic primer
cactcacaggagccaatgggaacccagaggggactccatc

SEQ ID NO: 35632 - DNA, 40 bp, Artificial Sequence
  Description of Artificial Sequence: Synthetic primer
attggctcctgggtttcatgttctgtgacatcctgcttct

SEQ ID NO: 35633 - DNA, 40 bp, Artificial Sequence
  Description of Artificial Sequence: Synthetic primer
ttctcccggccaaagtgaactttaatcggggtggttggat

SEQ ID NO: 35634 - DNA, 40 bp, Artificial Sequence
  Description of Artificial Sequence: Synthetic primer
ctgttggtagttgatggggttccctgtccactgctgatct

SEQ ID NO: 35635 - DNA, 40 bp, Artificial Sequence
  Description of Artificial Sequence: Synthetic primer
ttcagatgtttaacgattcgtcttcctcctcggggatgct

SEQ ID NO: 35636 - DNA, 40 bp, Artificial Sequence
  Description of Artificial Sequence: Synthetic primer
cactcttccgctagggataaagcagatgtggatgcccttt

SEQ ID NO: 35637 - DNA, 40 bp, Artificial Sequence
  Description of Artificial Sequence: Synthetic primer
ttcatcaacctggatgttacggaagtttttcatcccacat

SEQ ID NO: 35638 - DNA, 40 bp, Artificial Sequence
  Description of Artificial Sequence: Synthetic primer
tcaggatggaggaagactcgatccgcctgcctgcgcacct

SEQ ID NO: 35639 - DNA, 40 bp, Artificial Sequence
  Description of Artificial Sequence: Synthetic primer
cgaaatcttcatcttccgcccctcagctaccaggatgttt

SEQ ID NO: 35640 - DNA, 40 bp, Artificial Sequence
  Description of Artificial Sequence: Synthetic primer
acccaccgcatgcatcgtggcgcacacgtcatccaggatg

SEQ ID NO: 35641 - DNA, 40 bp, Artificial Sequence
  Description of Artificial Sequence: Synthetic primer
aatacatagaaggagactttgagcacaagggagaagagag

SEQ ID NO: 35642 - DNA, 40 bp, Artificial Sequence
  Description of Artificial Sequence: Synthetic primer
gttttcatagcttggggatgaaggtgcttgccctccaggt

SEQ ID NO: 35643 - DNA, 40 bp, Artificial Sequence
  Description of Artificial Sequence: Synthetic primer
ctgccatggatggcatggcagggggaaccctcctggaaga

SEQ ID NO: 35644 - DNA, 40 bp, Artificial Sequence
  Description of Artificial Sequence: Synthetic primer
gccccgcagcgccgggctcagcgcatccggccgcccatgt

SEQ ID NO: 35645 - DNA, 40 bp, Artificial Sequence
  Description of Artificial Sequence: Synthetic primer
ccacggctcaacatttcatctgcttcatccaaaacaaaca

SEQ ID NO: 35646 - DNA, 40 bp, Artificial Sequence
  Description of Artificial Sequence: Synthetic primer
tgagcacaggcgccctgatcgccatcctcgcctgcatcgt

SEQ ID NO: 35647 - DNA, 40 bp, Artificial Sequence
  Description of Artificial Sequence: Synthetic primer
aaggaaaaactgggtaaaggacaagttcctccctttcact

SEQ ID NO: 35648 - DNA, 40 bp, Artificial Sequence
  Description of Artificial Sequence: Synthetic primer
tgtgcctccgactcctgcagtctcgctgcccacgcgtcct

SEQ ID NO: 35649 - DNA, 40 bp, Artificial Sequence
  Description of Artificial Sequence: Synthetic primer
tcttcttatcccagttgatgaagtagctgtggcccagacg

SEQ ID NO: 35650 - DNA, 40 bp, Artificial Sequence
  Description of Artificial Sequence: Synthetic primer
tgtcccgggccagctccgggccacactcggcagtcccatc

SEQ ID NO: 35651 - DNA, 40 bp, Artificial Sequence
  Description of Artificial Sequence: Synthetic primer
gaggcccaggctgatgggaaggagcacccaggagctgaag

SEQ ID NO: 35652 - DNA, 40 bp, Artificial Sequence
  Description of Artificial Sequence: Synthetic primer
taagaaaaataggtcagataagtatgggatgatagttgaa

SEQ ID NO: 35653 - DNA, 40 bp, Artificial Sequence
  Description of Artificial Sequence: Synthetic primer
tgggctggctgtgttcatccccgctgcaggtcgggcgtct

SEQ ID NO: 35654 - DNA, 40 bp, Artificial Sequence
  Description of Artificial Sequence: Synthetic primer
tgaccctgagcatgacagatactaaacccatcactacatc

SEQ ID NO: 35655 - DNA, 40 bp, Artificial Sequence
  Description of Artificial Sequence: Synthetic primer
tgtccgtgtttcaccttccggagccagcggctgtgcgaga

SEQ ID NO: 35656 - DNA, 40 bp, Artificial Sequence
  Description of Artificial Sequence: Synthetic primer
aaaagctgtctccctcttttgggagaagacaacatcctac

SEQ ID NO: 35657 - DNA, 40 bp, Artificial Sequence
  Description of Artificial Sequence: Synthetic primer
ctgcggctggtgtggagcagggatgcttgcttggtgatct

SEQ ID NO: 35658 - DNA, 40 bp, Artificial Sequence
  Description of Artificial Sequence: Synthetic primer
atccataaactctggcttcaagtttccttcctcaccagtt

SEQ ID NO: 35659 - DNA, 40 bp, Artificial Sequence
  Description of Artificial Sequence: Synthetic primer
atcgccttgttttcttttaacacgggactgacgtaggatg

SEQ ID NO: 35660 - DNA, 40 bp, Artificial Sequence
  Description of Artificial Sequence: Synthetic primer
aatattgaatggaacttctatatgaggatgctgtgatcta

SEQ ID NO: 35661 - DNA, 40 bp, Artificial Sequence
  Description of Artificial Sequence: Synthetic primer
tggaaggcatccgatgtgcaatccgaatcgcctgcatctt

SEQ ID NO: 35662 - DNA, 40 bp, Artificial Sequence
  Description of Artificial Sequence: Synthetic primer
tgtgtcatccattggaagcccttgctcttgcactttgcat

SEQ ID NO: 35663 - DNA, 40 bp, Artificial Sequence
  Description of Artificial Sequence: Synthetic primer
tccaacttccaagacaagataccggtgcttctggaaacta

SEQ ID NO: 35664 - DNA, 40 bp, Artificial Sequence
  Description of Artificial Sequence: Synthetic primer
ttcattctgcacatgagcaagaattcatccacagcaaaat

SEQ ID NO: 35665 - DNA, 40 bp, Artificial Sequence
  Description of Artificial Sequence: Synthetic primer
gtcgccccccagcatcctcaccccgcccgtggtccccact

SEQ ID NO: 35666 - DNA, 40 bp, Artificial Sequence
  Description of Artificial Sequence: Synthetic primer
tgaggactcctgcacagcccagcctgaactagccaaagac

SEQ ID NO: 35667 - DNA, 40 bp, Artificial Sequence
  Description of Artificial Sequence: Synthetic primer
aaggcagtgggcacaggggctcctcgttttcagcatggat

SEQ ID NO: 35668 - DNA, 40 bp, Artificial Sequence
  Description of Artificial Sequence: Synthetic primer
tttcttcttctatgccagaagtttgagcccgcttatatcc

SEQ ID NO: 35669 - DNA, 40 bp, Artificial Sequence
  Description of Artificial Sequence: Synthetic primer
ttgatgaacaagtgatagattctctgactgtgaagatcat

SEQ ID NO: 35670 - DNA, 40 bp, Artificial Sequence
  Description of Artificial Sequence: Synthetic primer
tcgcaatgacttgggataagggcattccaaatgcctgtgg

SEQ ID NO: 35671 - DNA, 40 bp, Artificial Sequence
  Description of Artificial Sequence: Synthetic primer
tgaaggaaaccccatcttccccatccatttcggggtcatt

SEQ ID NO: 35672 - DNA, 40 bp, Artificial Sequence
  Description of Artificial Sequence: Synthetic primer
atggccactcagatttcttctgcaatggagtacttagaga

SEQ ID NO: 35673 - DNA, 40 bp, Artificial Sequence
  Description of Artificial Sequence: Synthetic primer
agtccacatagcctgagcagtagtcaagcagctggtgtcc

SEQ ID NO: 35674 - DNA, 40 bp, Artificial Sequence
  Description of Artificial Sequence: Synthetic primer
actaccaagcccccagtcatccagggaaattcagagacca

SEQ ID NO: 35675 - DNA, 40 bp, Artificial Sequence
  Description of Artificial Sequence: Synthetic primer
tgctttaatttttggacagcttttaacatccagtaactat

SEQ ID NO: 35676 - DNA, 40 bp, Artificial Sequence
  Description of Artificial Sequence: Synthetic primer
atgatcgccactggcaaggacggggaggaacacagacttc

SEQ ID NO: 35677 - DNA, 40 bp, Artificial Sequence
  Description of Artificial Sequence: Synthetic primer
tcagcctgaggctgagactgcgggatggtcctggggctct

SEQ ID NO: 35678 - DNA, 40 bp, Artificial Sequence
  Description of Artificial Sequence: Synthetic primer
ttttggcgaggatgggaatattttcagtgaaggtcttgaa

SEQ ID NO: 35679 - DNA, 40 bp, Artificial Sequence
  Description of Artificial Sequence: Synthetic primer
tatgaaaacctcagtcatgtcatccgtcagcatcttgcag

SEQ ID NO: 35680 - DNA, 40 bp, Artificial Sequence
  Description of Artificial Sequence: Synthetic primer
cggctggctgaggaaatcgcctcccgagaagaagttgagg

SEQ ID NO: 35681 - DNA, 40 bp, Artificial Sequence
  Description of Artificial Sequence: Synthetic primer
tagaccagatttgcccatccttcctctgaagttaacgtgt

SEQ ID NO: 35682 - DNA, 40 bp, Artificial Sequence
  Description of Artificial Sequence: Synthetic primer
tacgatcaggcacaggtcaggggtgacacagactcatcct

SEQ ID NO: 35683 - DNA, 40 bp, Artificial Sequence
  Description of Artificial Sequence: Synthetic primer
acctgtcccacctggcggccatcgtcatcctgctgctgaa

SEQ ID NO: 35684 - DNA, 40 bp, Artificial Sequence
  Description of Artificial Sequence: Synthetic primer
agagctggagtttgccatccagcccaacaccaccgggaag

SEQ ID NO: 35685 - DNA, 40 bp, Artificial Sequence
  Description of Artificial Sequence: Synthetic primer
ccaccctttctttgctctacctatgagctgtgattggaac

SEQ ID NO: 35686 - DNA, 40 bp, Artificial Sequence
  Description of Artificial Sequence: Synthetic primer
gctgagctctattatctcacagcacgtccagaaggctaac

SEQ ID NO: 35687 - DNA, 40 bp, Artificial Sequence
  Description of Artificial Sequence: Synthetic primer
acttccactggtggatgtgggagtggaggaagcaggctga

SEQ ID NO: 35688 - DNA, 40 bp, Artificial Sequence
  Description of Artificial Sequence: Synthetic primer
ccccctcccaccccctccccaaactcaatcttcatcctca

SEQ ID NO: 35689 - DNA, 40 bp, Artificial Sequence
  Description of Artificial Sequence: Synthetic primer
gaccctcgtcttcttcgaggatggcggcctccacatggtc

SEQ ID NO: 35690 - DNA, 40 bp, Artificial Sequence
  Description of Artificial Sequence: Synthetic primer
cagggccgcaggggagcagcagcaggcgctcggggccatc

SEQ ID NO: 35691 - DNA, 40 bp, Artificial Sequence
  Description of Artificial Sequence: Synthetic primer
caagtgcgtgcagaaggacatccaaccctacatgcgcaga

SEQ ID NO: 35692 - DNA, 40 bp, Artificial Sequence
  Description of Artificial Sequence: Synthetic primer
gctagtctggctctcttcagcttcagctgcttggcctgga

SEQ ID NO: 35693 - DNA, 40 bp, Artificial Sequence
  Description of Artificial Sequence: Synthetic primer
tttgtgtctgggtgagaggaaccctggatggccactctgc

SEQ ID NO: 35694 - DNA, 40 bp, Artificial Sequence
  Description of Artificial Sequence: Synthetic primer
tctgagattctgtagaacaggatgcgttcgaagatgtttc

SEQ ID NO: 35695 - DNA, 40 bp, Artificial Sequence
  Description of Artificial Sequence: Synthetic primer
cagctgctcaggctcatcctggcaagtgcccatgtagaag

SEQ ID NO: 35696 - DNA, 40 bp, Artificial Sequence
  Description of Artificial Sequence: Synthetic primer
gactgctgagcctcaacatccgactcccgagacatcacga

SEQ ID NO: 35697 - DNA, 40 bp, Artificial Sequence
  Description of Artificial Sequence: Synthetic primer
ggttccgcagcacatggattgcatcatccagtctgtctaa

SEQ ID NO: 35698 - DNA, 40 bp, Artificial Sequence
  Description of Artificial Sequence: Synthetic primer
aacatctgggtcaccgctcatccggccactccgcaggata

SEQ ID NO: 35699 - DNA, 40 bp, Artificial Sequence
  Description of Artificial Sequence: Synthetic primer
ctatttacagatatgttacaggccgggatggtcacagagg

SEQ ID NO: 35700 - DNA, 40 bp, Artificial Sequence
  Description of Artificial Sequence: Synthetic primer
ggaagagaagccttttgcctgcccagttcctggatgtaaa

SEQ ID NO: 35701 - DNA, 40 bp, Artificial Sequence
  Description of Artificial Sequence: Synthetic primer
tgagggggctgaggatgcctgagacccaaatgaatcttga

SEQ ID NO: 35702 - DNA, 40 bp, Artificial Sequence
  Description of Artificial Sequence: Synthetic primer
ttgacagcaatacatacgcctagtacagctgagccatcca

SEQ ID NO: 35703 - DNA, 40 bp, Artificial Sequence
  Description of Artificial Sequence: Synthetic primer
tggaggaggagcagatcatcctggaggaccagaactgcaa

SEQ ID NO: 35704 - DNA, 40 bp, Artificial Sequence
  Description of Artificial Sequence: Synthetic primer
gctggctgggtggcaccagcagcctggaccctgtggatga

SEQ ID NO: 35705 - DNA, 40 bp, Artificial Sequence
  Description of Artificial Sequence: Synthetic primer
ctgaaacttgggacatgtcttgaccctcatcagcatccat

SEQ ID NO: 35706 - DNA, 40 bp, Artificial Sequence
  Description of Artificial Sequence: Synthetic primer
tcctgagggtgttgctggctgactcggatgggggctccag

SEQ ID NO: 35707 - DNA, 40 bp, Artificial Sequence
  Description of Artificial Sequence: Synthetic primer
cgtcctcacggccgacaggtctggggatgatgtgcggaac

SEQ ID NO: 35708 - DNA, 40 bp, Artificial Sequence
  Description of Artificial Sequence: Synthetic primer
tcacctgcatcaatgtttctcttacagaaaagaccccggc

SEQ ID NO: 35709 - DNA, 40 bp, Artificial Sequence
  Description of Artificial Sequence: Synthetic primer
gggaaggaaggatgttcaggcaaggttcttactcctttac

SEQ ID NO: 35710 - DNA, 40 bp, Artificial Sequence
  Description of Artificial Sequence: Synthetic primer
cgaccgccgacctccgcctcctcatcctgacagcgggaaa

SEQ ID NO: 35711 - DNA, 40 bp, Artificial Sequence
  Description of Artificial Sequence: Synthetic primer
ctcccgtcgtccatccttcactcgggctgatggctttgat

SEQ ID NO: 35712 - DNA, 40 bp, Artificial Sequence
  Description of Artificial Sequence: Synthetic primer
ggaacaaggctttccttaccattatcatcctattgattgt

SEQ ID NO: 35713 - DNA, 40 bp, Artificial Sequence
  Description of Artificial Sequence: Synthetic primer
ggggggctcagccagccaatcccagccatccccctgtgac

SEQ ID NO: 35714 - DNA, 40 bp, Artificial Sequence
  Description of Artificial Sequence: Synthetic primer
atgaggaattggtttcgcgttggttgtgttgtctttcctc

SEQ ID NO: 35715 - DNA, 40 bp, Artificial Sequence
  Description of Artificial Sequence: Synthetic primer
atggggggttcttctggccacacctgggaaggagggctgc

SEQ ID NO: 35716 - DNA, 40 bp, Artificial Sequence
  Description of Artificial Sequence: Synthetic primer
cctattgcatttccatccagtctggtagacccagtaaaaa

SEQ ID NO: 35717 - DNA, 40 bp, Artificial Sequence
  Description of Artificial Sequence: Synthetic primer
aaatttccagcttccccgaaggatggaaaaaaggcaattc

SEQ ID NO: 35718 - DNA, 40 bp, Artificial Sequence
  Description of Artificial Sequence: Synthetic primer
actcgggcagctcgcacgcctcctcgatcagcggcggggg

SEQ ID NO: 35719 - DNA, 40 bp, Artificial Sequence
  Description of Artificial Sequence: Synthetic primer
caaggttccattaaatacatcatgcttaaccctagttcac

SEQ ID NO: 35720 - DNA, 40 bp, Artificial Sequence
  Description of Artificial Sequence: Synthetic primer
tgggtgatgccaaggacgatgggatgtggggaccgacgta

SEQ ID NO: 35721 - DNA, 40 bp, Artificial Sequence
  Description of Artificial Sequence: Synthetic primer
atccagcttctatgaaaaggttcttcagatcatccactgt

SEQ ID NO: 35722 - DNA, 40 bp, Artificial Sequence
  Description of Artificial Sequence: Synthetic primer
cccctccagccctgggcagcccatcactgtgtcagcgcgc

SEQ ID NO: 35723 - DNA, 40 bp, Artificial Sequence
  Description of Artificial Sequence: Synthetic primer
acaacattgtgttctaccctgcgacgagcaaaaaggagga

SEQ ID NO: 35724 - DNA, 40 bp, Artificial Sequence
  Description of Artificial Sequence: Synthetic primer
ggggcggcggccgaggctacagagccggcggcaggggatg

SEQ ID NO: 35725 - DNA, 40 bp, Artificial Sequence
  Description of Artificial Sequence: Synthetic primer
tccagagctcctctgaagccagggggctaacggatgttgt

SEQ ID NO: 35726 - DNA, 40 bp, Artificial Sequence
  Description of Artificial Sequence: Synthetic primer
atccttcctgttgagtccagcctgaaggaagccatcattg

SEQ ID NO: 35727 - DNA, 40 bp, Artificial Sequence
  Description of Artificial Sequence: Synthetic primer
attgtgaaaagtgacatcagcatcccatgccactataaat

SEQ ID NO: 35728 - DNA, 40 bp, Artificial Sequence
  Description of Artificial Sequence: Synthetic primer
ctatagtatctattttatgaaattccaagaagggatgaat

SEQ ID NO: 35729 - DNA, 40 bp, Artificial Sequence
  Description of Artificial Sequence: Synthetic primer
tccattatacactgaataagatggttattgtcatccaaca

SEQ ID NO: 35730 - DNA, 40 bp, Artificial Sequence
  Description of Artificial Sequence: Synthetic primer
gccctggggccggcgatgtgccaccgaggctgaggatgat

SEQ ID NO: 35731 - DNA, 40 bp, Artificial Sequence
  Description of Artificial Sequence: Synthetic primer
acatgatgctttcaggaggcatccagcgaatggggagcat

SEQ ID NO: 35732 - DNA, 40 bp, Artificial Sequence
  Description of Artificial Sequence: Synthetic primer
atccccaacttgcccacaaagctgtgggtggtttctggta

SEQ ID NO: 35733 - DNA, 40 bp, Artificial Sequence
  Description of Artificial Sequence: Synthetic primer
catggaagcgattcggctcatccgcttctgtggcaaatac

SEQ ID NO: 35734 - DNA, 40 bp, Artificial Sequence
  Description of Artificial Sequence: Synthetic primer
tgatatttttgggagattacctatactgaacaatagtgga

SEQ ID NO: 35735 - DNA, 40 bp, Artificial Sequence
  Description of Artificial Sequence: Synthetic primer
gctacgcaacaccacgcccaacttcgtgcgctgcatcatc

SEQ ID NO: 35736 - DNA, 40 bp, Artificial Sequence
  Description of Artificial Sequence: Synthetic primer
ggagcaatggcttgtgagttctgaggatgggggagccaag

SEQ ID NO: 35737 - DNA, 40 bp, Artificial Sequence
  Description of Artificial Sequence: Synthetic primer
tccagagtagacaagccctcaaggatgcccggtccccatc

SEQ ID NO: 35738 - DNA, 40 bp, Artificial Sequence
  Description of Artificial Sequence: Synthetic primer
acaacgcccatcctctgcggagcccaatacagaatacaca

SEQ ID NO: 35739 - DNA, 40 bp, Artificial Sequence
  Description of Artificial Sequence: Synthetic primer
tattttgatcttttggatgcaggtgccttaatgaagctct

SEQ ID NO: 35740 - DNA, 40 bp, Artificial Sequence
  Description of Artificial Sequence: Synthetic primer
atggagatggtgctggtgcaggtactacagttaataattt

SEQ ID NO: 35741 - DNA, 40 bp, Artificial Sequence
  Description of Artificial Sequence: Synthetic primer
ccgctaccaggagaccgggtccatccggcctggggccatc

SEQ ID NO: 35742 - DNA, 40 bp, Artificial Sequence
  Description of Artificial Sequence: Synthetic primer
gccatggtaggaagcatactggacctttcttcatccatca

SEQ ID NO: 35743 - DNA, 40 bp, Artificial Sequence
  Description of Artificial Sequence: Synthetic primer
tgccgaaggcctcgagcagcgggttggactgcaggatgat

SEQ ID NO: 35744 - DNA, 40 bp, Artificial Sequence
  Description of Artificial Sequence: Synthetic primer
cacatgaatacaaaatagttttagaagcccctgccaaatg

SEQ ID NO: 35745 - DNA, 40 bp, Artificial Sequence
  Description of Artificial Sequence: Synthetic primer
cctacgaatctacaaatgggtccctgtgacggagcccaag

SEQ ID NO: 35746 - DNA, 40 bp, Artificial Sequence
  Description of Artificial Sequence: Synthetic primer
aatagcactcaggagcaactccttctggaggtgagcacag

SEQ ID NO: 35747 - DNA, 40 bp, Artificial Sequence
  Description of Artificial Sequence: Synthetic primer
ttgctatttcttttaacgctccttcatctgcatcctcaac

SEQ ID NO: 35748 - DNA, 40 bp, Artificial Sequence
  Description of Artificial Sequence: Synthetic primer
atcccagttttcttctttggcgttccttaccgcactgtct

SEQ ID NO: 35749 - DNA, 40 bp, Artificial Sequence
  Description of Artificial Sequence: Synthetic primer
cgaaagaatctcttcttttcctttcagatcgtgaagaatg

SEQ ID NO: 35750 - DNA, 40 bp, Artificial Sequence
  Description of Artificial Sequence: Synthetic primer
ggcctcccagatggacttgctggatgggcctggggcagag

SEQ ID NO: 35751 - DNA, 40 bp, Artificial Sequence
  Description of Artificial Sequence: Synthetic primer
tctcagtgccccagaggtctaggataggatttctaaactg

SEQ ID NO: 35752 - DNA, 40 bp, Artificial Sequence
  Description of Artificial Sequence: Synthetic primer
ttaaaatggaataagaaaggaaatttcatcctaagtgctg

SEQ ID NO: 35753 - DNA, 40 bp, Artificial Sequence
  Description of Artificial Sequence: Synthetic primer
gatgtgccgaggaggggtctgcacacggatggcatgagga

SEQ ID NO: 35754 - DNA, 40 bp, Artificial Sequence
  Description of Artificial Sequence: Synthetic primer
gttcgcattgaaagaaggatgaggtgcttcaaatcaaagt

SEQ ID NO: 35755 - DNA, 40 bp, Artificial Sequence
  Description of Artificial Sequence: Synthetic primer
aaatcccaaaaagggccagccctgagaagcttacctgaaa

SEQ ID NO: 35756 - DNA, 40 bp, Artificial Sequence
  Description of Artificial Sequence: Synthetic primer
tttaaggccctggatgttcagtggcacagacctggggttg

SEQ ID NO: 35757 - DNA, 40 bp, Artificial Sequence
  Description of Artificial Sequence: Synthetic primer
acccatttaacattgacttgggtcagcaaagccagaggag

SEQ ID NO: 35758 - DNA, 40 bp, Artificial Sequence
  Description of Artificial Sequence: Synthetic primer
aagattaacatataccagtacagatgagcatgatgctatg

SEQ ID NO: 35759 - DNA, 40 bp, Artificial Sequence
  Description of Artificial Sequence: Synthetic primer
cctggctcagccattccccgctgccccggatggggagaga

SEQ ID NO: 35760 - DNA, 40 bp, Artificial Sequence
  Description of Artificial Sequence: Synthetic primer
atgcaagcagattgttcttgccaaatcatcctccagaaat

SEQ ID NO: 35761 - DNA, 40 bp, Artificial Sequence
  Description of Artificial Sequence: Synthetic primer
cgtgggcctcggcgacacgggcaggaggaaaggcgggatg

SEQ ID NO: 35762 - DNA, 40 bp, Artificial Sequence
  Description of Artificial Sequence: Synthetic primer
gctgacctggatgcaaatttgactgacctgtagagcaagt

SEQ ID NO: 35763 - DNA, 40 bp, Artificial Sequence
  Description of Artificial Sequence: Synthetic primer
ccacgaattgcacttgggtgagttggagaagctgctggat

SEQ ID NO: 35764 - DNA, 40 bp, Artificial Sequence
  Description of Artificial Sequence: Synthetic primer
gcgcggagccggtggaggcgttggtgcagggcggcaggat

SEQ ID NO: 35765 - DNA, 40 bp, Artificial Sequence
  Description of Artificial Sequence: Synthetic primer
actgaccccagcatccccattaggaagaaatcaaaggatg

SEQ ID NO: 35766 - DNA, 40 bp, Artificial Sequence
  Description of Artificial Sequence: Synthetic primer
gtttgaaccaggatgctcagggcggcctaggcttggcttt

SEQ ID NO: 35767 - DNA, 40 bp, Artificial Sequence
  Description of Artificial Sequence: Synthetic primer
tcaccccgggccatcctgggctcttaccgcaagaagagga

SEQ ID NO: 35768 - DNA, 40 bp, Artificial Sequence
  Description of Artificial Sequence: Synthetic primer
tcgaaggaccggtcgtagctctgctccgtgtaggatgact

SEQ ID NO: 35769 - DNA, 40 bp, Artificial Sequence
  Description of Artificial Sequence: Synthetic primer
caggacagccttttctgctggttatggagccctgatggat

SEQ ID NO: 35770 - DNA, 40 bp, Artificial Sequence
  Description of Artificial Sequence: Synthetic primer
aaggcagctctcctcaagtcagaggagtgtgaacaatgag

SEQ ID NO: 35771 - DNA, 40 bp, Artificial Sequence
  Description of Artificial Sequence: Synthetic primer
atggggctggtctccatgttctgcatagagggtgcggaca

SEQ ID NO: 35772 - DNA, 40 bp, Artificial Sequence
  Description of Artificial Sequence: Synthetic primer
atgtgctttttatggatctcatcgagcttatgcagagcag

SEQ ID NO: 35773 - DNA, 40 bp, Artificial Sequence
  Description of Artificial Sequence: Synthetic primer
gggttgctgagagcatgtcgtcttctgggatggcagcttt

SEQ ID NO: 35774 - DNA, 40 bp, Artificial Sequence
  Description of Artificial Sequence: Synthetic primer
atggctcccagaattaccaagtgagtcctttcatttggag

SEQ ID NO: 35775 - DNA, 40 bp, Artificial Sequence
  Description of Artificial Sequence: Synthetic primer
acatggtagactttgctatggatgtatacaaaaaccttta

SEQ ID NO: 35776 - DNA, 40 bp, Artificial Sequence
  Description of Artificial Sequence: Synthetic primer
gggagggcaagcttgtgcctcaccatacaccatcctggaa

SEQ ID NO: 35777 - DNA, 40 bp, Artificial Sequence
  Description of Artificial Sequence: Synthetic primer
cccacccccaacgctctccgaccccatcctcaggaagggc

SEQ ID NO: 35778 - DNA, 40 bp, Artificial Sequence
  Description of Artificial Sequence: Synthetic primer
atttatttcagttcttcaaatcttggatgtactcagcaaa

SEQ ID NO: 35779 - DNA, 40 bp, Artificial Sequence
  Description of Artificial Sequence: Synthetic primer
ggctcccaaaaagtcgctcctcattttcttgtttgccatc

SEQ ID NO: 35780 - DNA, 40 bp, Artificial Sequence
  Description of Artificial Sequence: Synthetic primer
tgcctccgctgcagcttggcgcactcgcggatgcgccgct

SEQ ID NO: 35781 - DNA, 40 bp, Artificial Sequence
  Description of Artificial Sequence: Synthetic primer
ggcctccctcttggacaactctgacctcttccattttcat

SEQ ID NO: 35782 - DNA, 40 bp, Artificial Sequence
  Description of Artificial Sequence: Synthetic primer
acaatggagcccataaacagggatggggccacctgggaca

SEQ ID NO: 35783 - DNA, 40 bp, Artificial Sequence
  Description of Artificial Sequence: Synthetic primer
ggggtacgcgcggcggatggtttccacttcgcagcacagg

SEQ ID NO: 35784 - DNA, 40 bp, Artificial Sequence
  Description of Artificial Sequence: Synthetic primer
tctccacctgccaaggtccctgtactctgagagccacctg

SEQ ID NO: 35785 - DNA, 40 bp, Artificial Sequence
  Description of Artificial Sequence: Synthetic primer
attgtagtgtgcccacctctcccaggagccgcacgtagcc

SEQ ID NO: 35786 - DNA, 40 bp, Artificial Sequence
  Description of Artificial Sequence: Synthetic primer
ggagatggcgcactgcaggaacagccccaggctgcccatc

SEQ ID NO: 35787 - DNA, 40 bp, Artificial Sequence
  Description of Artificial Sequence: Synthetic primer
attgcatgtggagaaattatgagtactgcaggttggatgg

SEQ ID NO: 35788 - DNA, 40 bp, Artificial Sequence
  Description of Artificial Sequence: Synthetic primer
gatgtacattttgtataaaggtgataatggagagctactt

SEQ ID NO: 35789 - DNA, 40 bp, Artificial Sequence
  Description of Artificial Sequence: Synthetic primer
tacagaatttgtcacatccagagtagcactgttccttaat

SEQ ID NO: 35790 - DNA, 40 bp, Artificial Sequence
  Description of Artificial Sequence: Synthetic primer
tgtggcccggctctgcagcccggccacatccagctcactc

SEQ ID NO: 35791 - DNA, 40 bp, Artificial Sequence
  Description of Artificial Sequence: Synthetic primer
gaatgacaacagctccttcatagtggtggtggccatcctt

SEQ ID NO: 35792 - DNA, 40 bp, Artificial Sequence
  Description of Artificial Sequence: Synthetic primer
gaagtgttgaaggagtccttgactgctaaggagcagaggg

SEQ ID NO: 35793 - DNA, 40 bp, Artificial Sequence
  Description of Artificial Sequence: Synthetic primer
gctctgcaacataaagcagagcaagctattgcagtgatgg

SEQ ID NO: 35794 - DNA, 40 bp, Artificial Sequence
  Description of Artificial Sequence: Synthetic primer
tccttcttggggtacccatctgaagcttcttgtcttttac

SEQ ID NO: 35795 - DNA, 40 bp, Artificial Sequence
  Description of Artificial Sequence: Synthetic primer
gaaaggcaaattcaaacatggtggccgcgaggctctggtg

SEQ ID NO: 35796 - DNA, 40 bp, Artificial Sequence
  Description of Artificial Sequence: Synthetic primer
tggagagcatgaaactgggagcatcctgtggggggcttgt

SEQ ID NO: 35797 - DNA, 40 bp, Artificial Sequence
  Description of Artificial Sequence: Synthetic primer
ggggggaggccaaggccagcagctcgaggctcagttcatc

SEQ ID NO: 35798 - DNA, 40 bp, Artificial Sequence
  Description of Artificial Sequence: Synthetic primer
tggtggaacaaataccaacatccatccaaaatgaaaaaga

SEQ ID NO: 35799 - DNA, 40 bp, Artificial Sequence
  Description of Artificial Sequence: Synthetic primer
cctgggtctcaataaagagcagcttgttcctctggatgtt

SEQ ID NO: 35800 - DNA, 40 bp, Artificial Sequence
  Description of Artificial Sequence: Synthetic primer
tatgcaaagaaagggaagctattgctgggattttgaggag

SEQ ID NO: 35801 - DNA, 40 bp, Artificial Sequence
  Description of Artificial Sequence: Synthetic primer
ggacagtccaaagtccgtgagcttgatgtgccccatggat

SEQ ID NO: 35802 - DNA, 40 bp, Artificial Sequence
  Description of Artificial Sequence: Synthetic primer
cataaaatatacattctctagtaagttattttcatccaca

SEQ ID NO: 35803 - DNA, 40 bp, Artificial Sequence
  Description of Artificial Sequence: Synthetic primer
tgagcgccatcgtcatctcagccactctggtcatcctgct

SEQ ID NO: 35804 - DNA, 40 bp, Artificial Sequence
  Description of Artificial Sequence: Synthetic primer
aagaagtatggctttttatgcatccttcatcgagggcatt

SEQ ID NO: 35805 - DNA, 40 bp, Artificial Sequence
  Description of Artificial Sequence: Synthetic primer
aatttttgggttctggatgcaattcgtgcacgccaagaaa

SEQ ID NO: 35806 - DNA, 40 bp, Artificial Sequence
  Description of Artificial Sequence: Synthetic primer
ccccacctagagtcggaagatgacactagctactttgaca

SEQ ID NO: 35807 - DNA, 40 bp, Artificial Sequence
  Description of Artificial Sequence: Synthetic primer
cggcgggtgcagccactgggatgctccgtccccgcccgcg

SEQ ID NO: 35808 - DNA, 40 bp, Artificial Sequence
  Description of Artificial Sequence: Synthetic primer
aaactgtcaagtttccaaggtcccatcttcatcctctgta

SEQ ID NO: 35809 - DNA, 40 bp, Artificial Sequence
  Description of Artificial Sequence: Synthetic primer
accgtaaacaaaacatggtcactttcatcctttcgcacct

SEQ ID NO: 35810 - DNA, 40 bp, Artificial Sequence
  Description of Artificial Sequence: Synthetic primer
tcttaatgtcatctatgtacattacatcctgttcatttat

SEQ ID NO: 35811 - DNA, 40 bp, Artificial Sequence
  Description of Artificial Sequence: Synthetic primer
ccttttcagcaagctgtgctagcttaaccctgctatgatc

SEQ ID NO: 35812 - DNA, 40 bp, Artificial Sequence
  Description of Artificial Sequence: Synthetic primer
ctgaagaagtctccgtcaatggggatggttttcccgtggt

SEQ ID NO: 35813 - DNA, 40 bp, Artificial Sequence
  Description of Artificial Sequence: Synthetic primer
tgactgaaagacttatttttaagaaaacaggttgtgtttg

SEQ ID NO: 35814 - DNA, 40 bp, Artificial Sequence
  Description of Artificial Sequence: Synthetic primer
ctatatgcttttaaaatagaaacatttgtataacaaggaa

SEQ ID NO: 35815 - DNA, 40 bp, Artificial Sequence
  Description of Artificial Sequence: Synthetic primer
catagactatctgctcaatgacactggtctgcccgtggat

SEQ ID NO: 35816 - DNA, 40 bp, Artificial Sequence
  Description of Artificial Sequence: Synthetic primer
gaaccgcttccaccccctccaccgaaggtctggggacaag

SEQ ID NO: 35817 - DNA, 40 bp, Artificial Sequence
  Description of Artificial Sequence: Synthetic primer
atcccatctccgaactgtatgcagagccccatcagaccag

SEQ ID NO: 35818 - DNA, 40 bp, Artificial Sequence
  Description of Artificial Sequence: Synthetic primer
cagagggaactattctacatcctcctggcctattcggagt

SEQ ID NO: 35819 - DNA, 40 bp, Artificial Sequence
  Description of Artificial Sequence: Synthetic primer
gtccccgaaccctggtgtgtcaatcactgtcagcttcatc

SEQ ID NO: 35820 - DNA, 40 bp, Artificial Sequence
  Description of Artificial Sequence: Synthetic primer
tacattccacttggatggggccatatcgtagcatcccttc

SEQ ID NO: 35821 - DNA, 40 bp, Artificial Sequence
  Description of Artificial Sequence: Synthetic primer
caagcttcctgaagtctgcatctctgttcatcagttttag

SEQ ID NO: 35822 - DNA, 40 bp, Artificial Sequence
  Description of Artificial Sequence: Synthetic primer
cttccggggtctggaatgtgacggagctggtgagagtatc

SEQ ID NO: 35823 - DNA, 40 bp, Artificial Sequence
  Description of Artificial Sequence: Synthetic primer
tccgctcataggtcgccttggccaaggcctcgatggcaaa

SEQ ID NO: 35824 - DNA, 40 bp, Artificial Sequence
  Description of Artificial Sequence: Synthetic primer
tggaaggagtaattcataacttccctaccctccttccatc

SEQ ID NO: 35825 - DNA, 40 bp, Artificial Sequence
  Description of Artificial Sequence: Synthetic primer
aacgtgcgggtcaactatgacttcggtcccatccacatgc

SEQ ID NO: 35826 - DNA, 40 bp, Artificial Sequence
  Description of Artificial Sequence: Synthetic primer
ctgctctgctgtctaaagctcagtcgaggcttctgaggat

SEQ ID NO: 35827 - DNA, 40 bp, Artificial Sequence
  Description of Artificial Sequence: Synthetic primer
tcctcatggtcccggttccaaccttcttcctcagtacatc

SEQ ID NO: 35828 - DNA, 40 bp, Artificial Sequence
  Description of Artificial Sequence: Synthetic primer
tcagtgtgtcatctccaatcactttggttcatcctactct

SEQ ID NO: 35829 - DNA, 40 bp, Artificial Sequence
  Description of Artificial Sequence: Synthetic primer
gggtcagacggaggctccctttggatgccagtgtcagttg

SEQ ID NO: 35830 - DNA, 40 bp, Artificial Sequence
  Description of Artificial Sequence: Synthetic primer
ccagcacctaaaccatagtctgagtcacaaggagcagttg

SEQ ID NO: 35831 - DNA, 40 bp, Artificial Sequence
  Description of Artificial Sequence: Synthetic primer
aaaccaggctggctcatcccatttgatgaactccaaaggt

SEQ ID NO: 35832 - DNA, 40 bp, Artificial Sequence
  Description of Artificial Sequence: Synthetic primer
accggtttgtcagcatcggaccccgggacggcaactttct

SEQ ID NO: 35833 - DNA, 40 bp, Artificial Sequence
  Description of Artificial Sequence: Synthetic primer
atccaaaaagtctgagcgaggagtgactgccaaaaaggag

SEQ ID NO: 35834 - DNA, 40 bp, Artificial Sequence
  Description of Artificial Sequence: Synthetic primer
acagagtctgtggtggagaagatgctcaccaactggatgt

SEQ ID NO: 35835 - DNA, 40 bp, Artificial Sequence
  Description of Artificial Sequence: Synthetic primer
tgctgtcctgacccagctgctcagcatgggggtgttcagc

SEQ ID NO: 35836 - DNA, 40 bp, Artificial Sequence
  Description of Artificial Sequence: Synthetic primer
atccgcgtatttggaagagatgtttttctcctcggctaac

SEQ ID NO: 35837 - DNA, 40 bp, Artificial Sequence
  Description of Artificial Sequence: Synthetic primer
gctcaggagaacagagggatggaggaagggggctgctgta

SEQ ID NO: 35838 - DNA, 40 bp, Artificial Sequence
  Description of Artificial Sequence: Synthetic primer
ttacagaattcccctctgtaggctgagagtctgtagcttt

SEQ ID NO: 35839 - DNA, 40 bp, Artificial Sequence
  Description of Artificial Sequence: Synthetic primer
gactatgaagaaaccagtgccctggagatgagttgcaaga

SEQ ID NO: 35840 - DNA, 40 bp, Artificial Sequence
  Description of Artificial Sequence: Synthetic primer
accctacagcccagtgacctgatctttgagttcgcaagca

SEQ ID NO: 35841 - DNA, 40 bp, Artificial Sequence
  Description of Artificial Sequence: Synthetic primer
acgagatatgggtcttttcttgagtccagaggatggagtg

SEQ ID NO: 35842 - DNA, 40 bp, Artificial Sequence
  Description of Artificial Sequence: Synthetic primer
caaatgaacttccccttgggggacatcctggtttttatag

SEQ ID NO: 35843 - DNA, 40 bp, Artificial Sequence
  Description of Artificial Sequence: Synthetic primer
gatgagtacccaaaagctcagccagccccatcaggactct

SEQ ID NO: 35844 - DNA, 40 bp, Artificial Sequence
  Description of Artificial Sequence: Synthetic primer
aacgagctggatgcgtcggttgagggcggccacatcacct

SEQ ID NO: 35845 - DNA, 40 bp, Artificial Sequence
  Description of Artificial Sequence: Synthetic primer
ttaatgattattgtcatccctttaaatctgtgcctttttc

SEQ ID NO: 35846 - DNA, 40 bp, Artificial Sequence
  Description of Artificial Sequence: Synthetic primer
cggtgctgggctccccgtctgccttgaggggtgtgcatgg

SEQ ID NO: 35847 - DNA, 40 bp, Artificial Sequence
  Description of Artificial Sequence: Synthetic primer
catacctgcggatatggacgggaaatccatcctcaagctg

SEQ ID NO: 35848 - DNA, 40 bp, Artificial Sequence
  Description of Artificial Sequence: Synthetic primer
tccaagtgtggcactttctgcctccccttcggcatcagag

SEQ ID NO: 35849 - DNA, 40 bp, Artificial Sequence
  Description of Artificial Sequence: Synthetic primer
tttggtggctggagttaactttacatccccaaggcccatc

SEQ ID NO: 35850 - DNA, 40 bp, Artificial Sequence
  Description of Artificial Sequence: Synthetic primer
atccagcgggatggtgaactttgtcagcagatggaagatt

SEQ ID NO: 35851 - DNA, 40 bp, Artificial Sequence
  Description of Artificial Sequence: Synthetic primer
aaaaccatgaatttgactaaccatgccattgaaaaccatc

SEQ ID NO: 35852 - DNA, 40 bp, Artificial Sequence
  Description of Artificial Sequence: Synthetic primer
gacgtaggtcaggttgggctccatgatgtcgctggctctc

SEQ ID NO: 35853 - DNA, 40 bp, Artificial Sequence
  Description of Artificial Sequence: Synthetic primer
tggtgggctgactgtgatatactgtattggagaaaccatc

SEQ ID NO: 35854 - DNA, 40 bp, Artificial Sequence
  Description of Artificial Sequence: Synthetic primer
tttattaaacaacgagatgttttatctgttggccaaactc

SEQ ID NO: 35855 - DNA, 40 bp, Artificial Sequence
  Description of Artificial Sequence: Synthetic primer
agaggacatgctcctaagcaaaagcccatcctcactcagc

SEQ ID NO: 35856 - DNA, 40 bp, Artificial Sequence
  Description of Artificial Sequence: Synthetic primer
gtgtggaaccatctggatgtgtgaaaagttaggaatagaa

SEQ ID NO: 35857 - DNA, 40 bp, Artificial Sequence
  Description of Artificial Sequence: Synthetic primer
gacaggaactgtcttcatgtccttacccaagcaagtcatc

SEQ ID NO: 35858 - protein, 6 aa, Artificial Sequence
  Description of Artificial Sequence: Synthetic 6xHis tag
HHHHHH
